(19) United States
(12) Patent Application Publication
(10) Pub. No.: US 2020/0140547 A1
(43) Pub. Date: May 7, 2020

(54) MULTIFUNCTIONAL ANTIBODY-LIGAND TRAPS TO MODULATE IMMUNE TOLERANCE

(71) Applicant: The Johns Hopkins University, Baltimore, MD (US)

(72) Inventors: Atul Bedi, Baltimore, MD (US); Rajani Ravi, Baltimore, MD (US)

(21) Appl. No.: 16/615,785

(22) PCT Filed: May 25, 2018
(86) PCT No.: PCT/US2018/034755

§ 371 Date: Nov. 21, 2019

Related U.S. Application Data
(60) Provisional application No. 62/592,341, filed on Nov. 29, 2017.
(60) Provisional application No. 62/511,911, filed on May 26, 2017.

(51) Int. Cl. C07K 16/28; A61K 45/06; A61K 39/395; A61P 35/00

(52) U.S. Cl. CPC C07K 16/2803; C07K 16/2818; C07K 16/2827; C07K 16/2866; C07K 16/2878; A61K 2039/505; A61K 45/06; A61K 39/3955; A61P 35/00; C07K 2317/31; C07K 2319/30; C07K 16/2863

(57) ABSTRACT

The invention provides multifunctional antibody-ligand traps and methods of using them to counteract immune tolerance and/or immune dysfunction. The multifunctional antibody-ligand traps and fusion proteins of the invention can counteract immune dysfunction in order to restore and unleash antitumor or pathogen-directed immune responses. Provided here are promising immunotherapeutic agents for treatment and prevention of cancers, infectious diseases, and immuno-inflammatory disorders.

### CROSS-REFERENCE TO RELATED APPLICATIONS

[0001] This application claims the benefit of priority under 35 U.S.C. § 119(e) of U.S. Applications Ser. Nos. 62/511,911, filed May 26, 2017, and 62/592,341, filed Nov. 29, 2017. The disclosure of the prior applications is considered part of and is incorporated by reference in the disclosure of this application in its entirety.

### INCORPORATION OF SEQUENCE LISTING

[0002] The material in the accompanying sequence listing is hereby incorporated by reference into this application. The accompanying sequence listing text file, JHU4100_2WO_Sequence_Listing.txt was created May 25, 2018 and is 1,145 kb. The file can be assessed using Microsoft Word on a computer that uses Windows OS.

### BACKGROUND OF THE INVENTION

### Field of the Invention

[0003] The present invention relates generally to the field of targeted immunomodulatory molecules and fusion proteins and more specifically to compositions and methods for targeted immunostimulatory or immunosuppressive molecules and fusion proteins to counteract or induce immune tolerance in cells.

### BACKGROUND INFORMATION

[0004] The immune system provides the human body with a means to recognize and defend itself against microorganisms and substances recognized as foreign or potentially harmful. While passive immunotherapy of cancer with monoclonal antibodies and passive transfer of T cells to attack tumor cells have demonstrated clinical efficacy, the goal of active immunotherapy to induce these immune effectors and establish immunological memory against tumor cells has remained challenging. Several tumor-specific and tumor-associated antigens have been identified, yet these antigens are generally weakly immunogenic and tumors employ diverse mechanisms to create a tolerogenic environment that allows them to evade immunologic attack. Strategies to overcome such immune tolerance and activating robust levels of antibody and/or T cell responses hold the key to effective cancer immunotherapy.

### SUMMARY OF THE INVENTION

[0005] The present invention is based on the seminal discovery that targeted immunomodulatory antibodies and fusion proteins can counteract or reverse immune tolerance, abnormal T cell differentiation, and T cell dysfunction or exhaustion in cancers, inflammatory disorders, and chronic infectious diseases.

[0006] In one embodiment the present invention provides molecules comprising a targeting moiety and one or more immunomodulatory moiety/moieties, wherein the targeting moiety comprises a polypeptide which specifically binds a component of a tumor cell, tumor microenvironment, tumor associated growth factor or receptor, tumor associated cytokine or receptor, tumor associated T lymphocyte, T cell co-stimulatory or inhibitory molecule, immune cell, pathogen, or pathogen-associated cell, and the immunomodulatory moiety comprises the extracellular domain (ECD) sequence or ligand binding fragment thereof of a T lymphocyte immunoreceptor, T cell inhibitory receptor (TCIR), T-cell co-inhibitory molecule, T cell co-stimulatory molecule, B lymphocyte receptor, DC receptor, NK cell receptor, cytokine receptor, growth factor receptor, chemokine receptor, or tumor cell receptor.

[0007] In one aspect, the targeting moiety polypeptide comprises an antigen-binding domain of an immunoglobulin, antibody, bispecific or multispecific antibody, antibody fragment, single chain variable fragment (scFv), bivalent or multivalent scFv, or Fc-containing polypeptide. In another aspect, the targeting moiety comprises a ligand-binding sequence from the extracellular domain (ECD) of a receptor.

[0008] In certain aspects, the targeting moiety is an antibody that specifically binds a T cell inhibitory receptor (TCIR), a T cell inhibitory receptor ligand (TCIR ligand), a T-cell co-inhibitory molecule, or a T cell co-stimulatory molecule. In an additional aspect, the antibody is an antagonist of a TCIR, TCIR ligand, or co-inhibitory molecule. In another aspect, the antibody is an agonist of a T cell co-stimulatory molecule. In an additional aspect, the targeting moiety polypeptide specifically binds one or more of the following molecules: Cytotoxic T lymphocyte associated antigen-4 (CTLA-4, CD152), Programmed Death-1 protein (PD-1), Programmed death ligand-1 (PD-L1), Programmed death ligand (PD-L2), B7-H3 (CD276), T-cell immunoglobulin and mucin-domain containing-3 (TIM-3), Carcinoembryonic antigen-related cell adhesion molecule 1 (CEACAM-1), Carcinoembryonic Antigen (CEA), V domain Ig suppressor of T cell activation (VISTA), V-set and immunoglobulin domain containing 8 (VSIG8), B and T lymphocyte attenuator (BTLA), Herpesvirus Entry Mediator (HVEM), CD160, T cell Ig and ITM domain (TIGIT), CD226, CD96, Lymphocyte activation gene-3 (LAG-3), transforming growth factor β (TGF-β), transforming growth factor β receptor (TGFβR), Receptor Activator of Nuclear Factor η B (RANK), RANK ligand (RANKL), 4-1BB (CD137), Inducible T-Cell Costimulator (ICOS), OX-40 (CD134), glucocorticoid-induced TNFR-related protein (GITR), CD27, IL6R, IL23R, IL17R, IL-6, IL-23, IL-17, CD39, CD40, CD4OL, CD47, CD122, CD73, CCR4, CCR5, CXCR4, IL12R, CD4, IL-2R, CD25, CD3. In certain aspects, the targeting moiety polypeptide specifically binds one or more of the following: Epidermal growth factor receptor (EGFR, EGFR1, ErbB-1, HER1), ErbB-2 (HER2/neu), ErbB-3/HER3, ErbB-4/HER4, Epidermal growth factor (EGF), Transforming growth factor α (TGFα), Vascular endothelial growth factor (VEGF), Vascular endothelial growth factor receptor-1 (VEGFR-1), VEGFR-2 or VEGFR-3. In certain aspects, the targeting moiety polypeptide specifically binds the human immunodeficiency virus gp120 protein (HIV gp120).

[0009] In various aspects, the immunomodulatory moiety comprises the extracellular ligand-binding sequence or ligand binding fragment thereof of transforming growth factor β receptor II (TGFβRII), programmed death 1 protein (PD-1), T cell immunoglobulin and mucin domain containing 3 (TIM-3), B- and T-lymphocyte attenuator (BTLA), CD160, CD226, T cell Ig and ITM domain (TIGIT), CD96, CD44, Colony stimulating factor 1 receptor (CSF1R), CCR4, Killer-cell immunoglobulin-like receptor (KIR), Vascular endothelial growth factor receptor (VEGFR), Receptor Activator of Nuclear Factor η B (RANK), V-set and immunoglobulin domain containing 8 (VSIG8), LIGHT (TNFSF14), Leukocyte-associated immunoglobulin-like receptor 1 (LAIR1), or V domain Ig suppressor of T cell activation (VISTA).

[0010] In some aspects, the molecule comprises a linker and the linker may have the sequence of SEQ ID NO: 3. In a further aspect, the linker fuses the targeting moiety and the immunomodulatory moiety.

[0011] In some aspects, the immunomodulatory moiety is fused to the heavy chain of a targeting moiety comprising an antibody. In other aspects, the immunomodulatory moiety is fused to the light chain of a targeting moiety comprising an antibody. In an additional aspect, one immunomodulatory moiety (IM-1) is fused to the heavy chain of a targeting moiety comprising an antibody, and a second immunomodulatory moiety (IM-2) is fused to the light chain of the same targeting antibody.

[0012] In one aspect, the targeting moiety is fused to an immunomodulatory moiety that comprises the ECD or a ligand binding fragment thereof of TIM-3. In a specific aspect, the ligand binding fragment comprises the CEACAM-1 binding fragment of TIM-3. In a specific aspect, the immunomodulatory moiety comprises a ligand-binding sequence of the TIM-3 extracellular domain (TIM-3 ectodomain; TIM-3ecd) corresponding to SEQ ID NO: 2.

[0013] In one aspect, the targeting moiety comprises a polypeptide that binds to PD-1, PD-L1, CTLA4, LAG3, VISTA, TIGIT, BTLA, CCR4, 41BB, OX40, GITR, VEGF, RANKL, TGF-β, IL6R, EGFR, HER2/neu, or gp120, and the immunomodulatory moiety is the ECD or a ligand binding fragment thereof of TIM-3. In a specific aspect, the immunomodulatory moiety comprises the CEACAM-1 binding fragment of TIM-3. In a specific aspect, the immunomodulatory moiety comprises a ligand-binding sequence of the TIM-3ecd corresponding to SEQ ID NO: 2 .

[0014] In certain aspects, the targeting moiety comprises a polypeptide that binds PD-1 or PD-L1 and the immunomodulatory moiety comprises the ECD or ligand binding fragment thereof of TIM-3. In specific aspects, the molecule comprises the sequence of SEQ ID NO: 51, 52, 53 or 192. In specific aspects, the molecule comprises the sequence of SEQ ID NO: 282, 288, 274, 278. In specific aspects, the molecule comprises the sequences corresponding to SEQ ID NO: 51 and SEQ ID NO: 185. In specific aspects, the molecule comprises the sequences corresponding to SEQ ID NO: 52 and SEQ ID NO: 186. In specific aspects, the molecule comprises the sequences corresponding to SEQ ID NO: 53 and SEQ ID NO: 187. In specific aspects the molecule comprises the sequences corresponding to SEQ ID NO: 192 and SEQ ID NO: 193.

[0015] In one aspect, the targeting moiety comprises a polypeptide that binds CTLA-4 and the immunomodulatory moiety comprises the ECD or ligand binding fragment thereof of TIM-3. In a specific aspect, the molecule comprises the sequence of SEQ ID NO: 50. In specific aspects, the molecule comprises the sequence of SEQ ID NO: 204. In specific aspects, the molecule comprises the sequences corresponding to SEQ ID NO: 50 and SEQ ID NO: 184.

[0016] In another aspect, the targeting moiety comprises a polypeptide that binds LAG-3 and the immunomodulatory moiety comprises the ECD or ligand binding fragment thereof of TIM-3. In one aspect, the molecule comprises the sequence of SEQ ID NO: 26. In specific aspects, the molecule comprises the sequences corresponding to SEQ ID NO: 26 and SEQ ID NO: 161.

[0017] In an additional aspect, the targeting moiety comprises a polypeptide that binds VISTA and the immunomodulatory moiety comprises the ECD or ligand binding fragment thereof of TIM-3. In a further aspect, the molecule comprises the sequence of SEQ ID NO: 12. In specific aspects, the molecule comprises the sequences corresponding to SEQ ID NO: 12 and SEQ ID NO: 147.

[0018] In one aspect, the targeting moiety comprises a polypeptide that binds TIGIT and the immunomodulatory moiety comprises the ECD or ligand binding fragment thereof of TIM-3. In a specific aspect, the molecule comprises the sequence of SEQ ID NO: 17. In specific aspects, the molecule comprises the sequences corresponding to SEQ ID NO: 17 and SEQ ID NO: 152.

[0019] In another aspect, the targeting moiety comprises a polypeptide that binds BTLA and the immunomodulatory moiety comprises the ECD or ligand binding fragment thereof of TIM-3. In an additional, aspect, the molecule comprises the sequence of SEQ ID NO: 22. In specific aspects, the molecule comprises the sequences corresponding to SEQ ID NO: 22 and SEQ ID NO: 157.

[0020] In an aspect, the targeting moiety comprises a polypeptide that binds CCR-4 and the immunomodulatory moiety comprises the ECD or ligand binding fragment thereof of TIM-3. In certain aspects, the molecule comprises the sequence of SEQ ID NO: 31. In specific aspects, the molecule comprises the sequences corresponding to SEQ ID NO: 31 and SEQ ID NO: 166.

[0021] In a further aspect, the targeting moiety comprises a polypeptide that binds 4-1BB and the immunomodulatory moiety comprises the ECD or ligand binding fragment thereof of TIM-3. In a specific aspect, the molecule comprises the sequence of SEQ ID NO: 116. In specific aspects, the molecule comprises the sequences corresponding to SEQ ID NO: 116 and SEQ ID NO: 117.

[0022] In one aspect, the targeting moiety comprises a polypeptide that binds VEGF and the immunomodulatory moiety comprises the ECD or ligand binding fragment thereof of TIM-3. In certain aspects, the molecule comprises the sequence of SEQ ID NO: 88. In specific aspects, the molecule comprises the sequence of SEQ ID NO: 252. In specific aspects, the molecule comprises the sequences corresponding to SEQ ID NO: 88 and SEQ ID NO: 89.

[0023] In one aspect, the targeting moiety comprises a polypeptide that binds RANKL and the immunomodulatory moiety comprises the ECD or ligand binding fragment thereof of TIM-3.

[0024] In one aspect, the targeting moiety comprises a polypeptide that binds IL6-R and the immunomodulatory moiety comprises the ECD or ligand binding fragment thereof of TIM-3. In certain aspects, the molecule comprises the sequence of SEQ ID NO: 219. In specific aspects, the molecule comprises the sequence of SEQ ID NO: 216. In specific aspects, the molecule comprises the sequences corresponding to SEQ ID NO: 219 and 61.

[0025] In one aspect, the targeting moiety comprises a polypeptide that binds EGFR and the immunomodulatory moiety comprises the ECD or ligand binding fragment thereof of TIM-3. In certain aspects, the molecule comprises the sequence of SEQ ID NO: 231. In specific aspects, the molecule comprises the sequence of SEQ ID NO: 228. In specific aspects the molecule comprises the sequences corresponding to SEQ ID NO: 231 and SEQ ID NO: 75.

[0026] In one aspect, the targeting moiety comprises a polypeptide that binds HER2/Neu and the immunomodulatory moiety comprises the ECD or ligand binding fragment thereof of TIM-3. In certain aspects, the molecule comprises the sequence of SEQ ID NO: 102. In specific aspects, the molecule comprises the sequence of SEQ ID NO: 240. In specific aspects, the molecule comprises the sequences corresponding to SEQ ID NO: 102 and SEQ ID NO: 103.

[0027] In one aspect, the targeting moiety comprises a polypeptide that binds HIV gp120 and the immunomodulatory moiety comprises the ECD or ligand binding fragment thereof of TIM-3. In certain aspects, the molecule comprises the sequence of SEQ ID NO: 267. In specific aspects, the molecule comprises the sequence of SEQ ID NO: 264. In specific aspects, the molecule comprises the sequences corresponding to SEQ ID NO: 267 and light chain of gp120 antibody.

[0028] In another aspect, the targeting moiety comprises fused to an immunomodulatory moiety that comprises the ECD or a ligand binding fragment thereof of PD-1. In certain aspects, this ligand binding fragment comprises a PD-L1 or PD-L2 binding fragment. In a specific aspect, the immunomodulatory moiety comprises a ligand-binding sequence of the PD-1 extracellular domain (PD-1ecd) corresponding to SEQ ID NO: 194. In a further aspect, the targeting moiety comprises a polypeptide that binds to TIM-3, CEACAM-1, BTLA, CCR4, CTLA4, LAG3, TIGIT, VISTA, 41BB, OX40, GITR, RANKL, TGF-β or VEGF and the immunomodulatory moiety comprises the ECD or a ligand binding fragment thereof of PD-1.

[0029] In another aspect, the targeting moiety comprises fused to an immunomodulatory moiety that comprises the ECD or a ligand binding fragment thereof of TGFβ receptor. In certain aspects, this ligand binding fragment comprises a TGFβ binding fragment of TGFβRII. In a specific aspect, the immunomodulatory moiety comprises a ligand-binding sequence of the TGFβRII extracellular domain (TGFβRII ecd) corresponding to SEQ ID NO: 6. In certain aspects, the targeting moiety comprises a polypeptide that binds to TIM-3, CEACAM-1, BTLA, CCR4, CTLA4, LAG3, PD-1, PD-L1, TIGIT, VISTA, 41BB, OX40, GITR, RANKL, or VEGF and the immunomodulatory moiety comprises the ECD or a ligand binding fragment thereof of TGFβRII.

[0030] In an additional aspect, the targeting moiety comprises fused to an immunomodulatory moiety that comprises the ECD or ligand binding fragment thereof of BTLA, CD160, or LIGHT. In certain aspects, the ligand binding fragment comprises an Herpesvirus entry mediator (HVEM, CD 270) binding fragment. In a specific aspect, the immunomodulatory moiety comprises a ligand-binding sequence of the BTLA extracellular domain (BTLA ecd) corresponding to SEQ ID NO: 8. In a specific aspect, the immunomodulatory moiety comprises a ligand-binding sequence of the LIGHT extracellular domain (LIGHT ecd) corresponding to SEQ ID NO: 302. In certain aspects, the targeting moiety comprises a polypeptide that binds to TIM-3, CEACAM-1, CCR4, CTLA4, LAG3, PD-1, PD-L1, TIGIT, VISTA, 41BB, OX40, GITR, RANKL, or VEGF and the immunomodulatory moiety comprises the ECD or a ligand binding fragment thereof of BTLA, CD160, or LIGHT.

[0031] In an additional aspect, the targeting moiety is fused to an immunomodulatory moiety that comprises the ECD or ligand binding fragment thereof of TIGIT or CD96. In one aspect, this ligand binding fragment comprises a CD155 or CD112 binding fragment. In certain aspects, the immunomodulatory moiety comprises the ECD or a ligand binding fragment thereof of TIGIT. In a specific aspect, the immunomodulatory moiety comprises a ligand-binding sequence of the TIGIT extracellular domain (TIGIT ECD) corresponding to SEQ ID NO: 289 . In a specific aspect, the immunomodulatory moiety comprises a ligand-binding sequence of the CD96 extracellular domain (CD96 ECD) corresponding to SEQ ID NO: 301. In another aspect, the targeting moiety comprises a polypeptide that binds to TIM-3, CEACAM-1, BTLA, CCR4, CTLA4, LAG3, PD-1, PD-L1, VISTA, 41BB, OX40, GITR, RANKL, TGF-β or VEGF and the immunomodulatory moiety comprises the ECD or a ligand binding fragment thereof of TIGIT.

[0032] In another aspect, the targeting moiety is fused to an immunomodulatory moiety that comprises the ECD or a ligand binding fragment thereof of CD226. In certain aspects, this ligand binding fragment comprises a CD155 or CD112 binding fragment. In a specific aspect, the immunodulatory moiety comprises a ligand-binding sequence of the CD226 extracellular domain (CD226 ECD) corresponding to SEQ ID NO: 9 . In another aspect, the targeting moiety comprises a polypeptide that binds to TIM-3, CEACAM-1, BTLA, CCR4, CTLA4, LAG3, PD-1, PD-L1, TIGIT, VISTA, 41BB, OX40, GITR, RANKL, TGF-β or VEGF and the immunomodulatory moiety comprises the ECD or a ligand binding fragment thereof of CD226.

[0033] In another aspect, the targeting moiety is fused to an immunomodulatory moiety that comprises the ECD or a ligand binding fragment thereof of VSIG8. In certain aspects, this ligand binding fragment comprises a VISTA binding fragment. In a specific aspect, the immunomodulatory moiety comprises a ligand-binding sequence of the VSIG8 extracellular domain (VSIG8 ecd) corresponding to SEQ ID NO: 55. In another aspect, the targeting moiety comprises a polypeptide that binds to TIM-3, CEACAM-1, BTLA, CCR4, CTLA4, LAG3, PD-1, PD-L1, TIGIT, 41BB, OX40, GITR, RANKL, TGF-β or VEGF and the immunomodulatory moiety comprises the ECD or a ligand binding fragment thereof of VSIG8.

[0034] In an additional aspect, the targeting moiety comprises a polypeptide that binds to TIM-3, CEACAM-1, BTLA, CCR4, CTLA4, LAG3, PD-1, PD-L1, TIGIT, VISTA, 41BB, OX40, GITR, RANKL, TGF-β or VEGF and the immunomodulatory moiety comprises the ECD or a ligand binding fragment thereof of CD44. In a specific aspect, the immunomodulatory moiety is a ligand-binding sequence of CD44 extracellular domain (CD44 ecd) corresponding to SEQ ID NO: 36.

[0035] In a further aspect, the immunomodulatory moiety comprises the ECD or ligand binding fragment thereof of CCR4 and the ligand binding fragment comprises a CCL22 binding fragment.

[0036] In an aspect, the molecule comprises the sequences of SEQ ID NOs: 10 and 145; 11 and 146; 12 and 147; 13 and 148; 14 and 149; 15 and 150; 16 and 151; 17 and 152; 18 and 153; 19 and 154, 20 and 155; 21 and 156; 22 and 157; 23 and 158; 24 and 159; 25 and 160; 26 and 161; 27 and 162; 28 and 163; 29 and 164; 30 and 165; 31 and 166; 32 and 167; 33 and 168; 34 and 169; 35 and 170; 37 and 171; 38 and 172; 39 and 173; 40 and 174; 41 and 175; 42 and 176; 43 and 177; 44 and 178; 45 and 179; 46 and 180; 47 and 181; 48 and 182; 49 and 183; 50 and 184; 51 and 185; 52 and 186; 53 and 187; 58 and 188; 59 and 189; 60 and 61; 62 and 63; 64 and 65; 66 and 67; 68 and 69; 70 and 71; 72 and 73; 74 and 75; 76 and 77; 78 and 79; 80 and 81; 82 and 83; 84 and 85; 86 and 87; 88 and 89; 90 and 91; 92 and 93; 94 and 95;, 96 and 97; 98 and 99; 100 and 101; 102 and 103; 104 and 105; 106 and 107; 108 and 109; 110 and 111; 112 and 113; 114 and 115; 116 and 117; 118 and 119; 120 and 121; 122 and 123; 124 and 125; 126 and 127;, 128 and 129; 130 and 131; 132 and 133; 134 and 135; 136 and 137; 138 and 139; 140 and 141; 142 and 143; 192 and 193; 209 and 210; 211 and 212; 221 and 222; 223 and 224; 233 and 234; 235 and 236; 245 and 246; 247 and 248; 257 and 258; 259 and 260; 269 and 270; 271 and 272; 275 and 276; 279 and 280; 283 and 284; 287 and 288; 290 and 291; 292 and 293; 294 and 295; 296 and 297; or 298 and 299.

[0037] In an additional embodiment, the present invention provides molecules comprising a targeting moiety, a first immunomodulatory moiety (IM-1) and a second immunomodulatory moiety (IM-2), wherein the targeting moiety comprises a polypeptide that specifically binds Cytotoxic T lymphocyte associated antigen-4 (CTLA-4, CD152), Programmed Death-1 protein (PD-1), Programmed death ligand-1 (PD-L1), V domain Ig suppressor of T cell activation (VISTA), B and T lymphocyte attenuator (BTLA), T cell Ig and ITIM domain (TIGIT), Lymphocyte activation gene-3 (LAG-3), 4-1BB ligand (CD137), OX-40 (CD134), glucocorticoid-induced TNFR-related protein (GITR), transforming growth factor β (TGF-β), CD27, CD47, IL6R, IL23R, IL17R, IL-6, IL-23, IL-17, CD39, CD73, CD122, CCR4, CCRS, CXCR4, IL12R, CD4, CD25, CD3, Receptor activator of nuclear factor kappa-B ligand (RANKL), RANK, epidermal growth factor receptor (EGFR), human epidermal growth factor receptor 2 (HER2) or Vascular endothelial growth factor (VEGF), the first immunomodulatory moiety (IM-1) comprises the extracellular ligand-binding sequence or ligand binding fragment thereof of transforming growth factor β receptor II (TGFβRII), programmed death 1 protein (PD-1), T cell immunoglobulin and mucin domain containing 3 (TIM-3), B- and T-lymphocyte attenuator (BTLA), CD226, T cell Ig and ITM domain (TIGIT), CD44, Colony stimulating factor 1 receptor (CSF1R), CCR4, Killer-cell immunoglobulin-like receptor (KIR), Vascular endothelial growth factor receptor (VEGFR), Receptor Activator of Nuclear Factor η B (RANK), V-set and immunoglobulin domain containing 8 (VSIG8), LIGHT (TNFSF14) or V domain Ig suppressor of T cell activation (VISTA); and the second immunomodulatory moiety (IM-2) comprises the extracellular ligand-binding sequence or ligand binding fragment thereof of transforming growth factor β receptor II (TGFβRII), programmed death 1 protein (PD-1), T cell immunoglobulin and mucin domain containing 3 (TIM-3), B- and T-lymphocyte attenuator (BTLA), CD226, T cell Ig and ITIM domain (TIGIT), CD44, Colony stimulating factor 1 receptor (CSF1R), CCR4, Killer-cell immunoglobulin-like receptor (KIR), Vascular endothelial growth factor receptor (VEGFR), Receptor Activator of Nuclear Factor η B (RANK), V-set and immunoglobulin domain containing 8 (VSIG8), LIGHT (TNFSF14) or V domain Ig suppressor of T cell activation (VISTA).

[0038] In some aspects, the molecule comprises the sequence of SEQ ID NOs: 201 and 202; 203 and 204; 205 and 206; 207 and 208; 213 and 214; 215 and 216; 217 and 218; 219 and 220; 225 and 226; 227 and 228; 229 and 230; 231 and 232; 237 and 238; 239 and 240; 241 and 242 ; 243 and 244; 249 and 250; 251 and 252; 253 and 254; 255 and 256; 261 and 262; 263 and 264; 265 and 266; 267 and 268; 273 and 274; 277 and 278; 281 and 282; 285 and 286.

[0039] In one aspect, the targeting moiety polypeptide comprises an antigen-binding domain of an immunoglobulin, antibody, bispecific or multispecific antibody, antibody fragment, single chain variable fragment (scFv), bivalent or multivalent scFv, a ligand-binding sequence from the extracellular domain (ECD) of a receptor, or Fc-containing polypeptide. In certain aspects, the polypeptide is an antibody.

[0040] In one aspect, the first immunomodulatory moiety is attached to the heavy chain of the antibody and the second immunomodulatory moiety is attached to the light chain of the antibody. In an additional aspect, the first immunomodulatory moiety is attached to the C-terminus of a heavy chain or a light chain of the antibody, the second immunomodulatory moiety is attached to the C-terminus of a heavy chain or a light chain of the antibody and/or the second immunomodulatory moiety is attached to the first immunomodulatory moiety.

[0041] In a further aspect, the first and second immunomodulatory moiety is attached to the heavy chain or the light chain of the antibody with a linker and/or the second immunomodulatory moiety is attached to the first immunomodulatory moiety with a linker. In certain aspects, the linker has the sequence of (GGGGS)n (SEQ ID NO: 3), wherein n can be 1,2,3,4,5,6,7,8,9, or 10. In certain aspects, the linker has the sequence of SEQ ID NO 3.In certain aspects, the first immunomodulatory moiety comprises the ECD or ligand binding fragment thereof of TIM3 and the second immunomodulatory moiety comprises the ECD or ligand binding fragment thereof of PD-1; the first immunomodulatory moiety comprises the ECD or ligand binding fragment thereof of TGFβRII and the second immunomodulatory moiety comprises the ECD or ligand binding fragment thereof of TIM-3; the first immunomodulatory moiety comprises the ECD or ligand binding fragment thereof of PD-1 and the second immunomodulatory moiety comprises the ECD or ligand binding fragment thereof of TIM-3; and/or the first immunomodulatory moiety comprises the ECD or ligand binding fragment thereof of TGFβRII and the second immunomodulatory moiety comprises the ECD or ligand binding fragment thereof of PD-1.

[0042] In a further aspect, the targeting moiety specifically binds IL6R, CTLA-4, PD-1, PD-L1, EGFR, HER2, VEGF, or gp120.

[0043] In one aspect, the targeting moiety comprises a polypeptide that binds CTLA-4, the first immunomodulatory moiety comprises the ECD or ligand binding fragment thereof of PD-1, and the second immunomodulatory moiety comprises the ECD or ligand binding fragment thereof of TGFβRII. In one aspect, the molecule comprises SEQ ID NO: 201 and SEQ ID NO: 202. In another aspect, the targeting moiety comprises a polypeptide that binds CTLA-4, the first immunomodulatory moiety comprises the ECD or ligand binding fragment thereof of PD-1, and the second immunomodulatory moiety comprises the ECD or ligand binding fragment thereof of TIM-3. In one aspect, the molecule comprises SEQ ID NO: 205 and SEQ ID NO: 206. In one aspect, the molecule comprises SEQ ID NO: 207 and SEQ ID NO: 208. In another aspect, the targeting moiety comprises a polypeptide that binds CTLA-4, the first immunomodulatory moiety comprises the ECD or ligand binding fragment thereof of TIM-3, and the second immunomodulatory moiety comprises the ECD or ligand binding fragment thereof of TGFβRII. In one aspect, the molecule comprises SEQ ID NO: 203 and SEQ ID NO: 204. In a further aspect, the targeting moiety polypeptide comprises ipilimumab. In a further aspect, this antibody is tremilimumab.

[0044] In one aspect, the targeting moiety comprises a polypeptide that binds PD-1 or PD-L1, the first immunomodulatory moiety comprises the ECD or ligand binding fragment thereof of TGFβRII, and the second immunomodulatory moiety comprises the ECD or ligand binding fragment thereof of TIM-3. In one aspect, the molecule comprises SEQ ID NO: 273 and SEQ ID NO: 274. In one aspect, the molecule comprises SEQ ID NO: 277 and SEQ ID NO: 278. In one aspect, the molecule comprises SEQ ID NO: 285 and SEQ ID NO: 286. In one aspect, the molecule comprises SEQ ID NO: 281 and SEQ ID NO: 282. In a further aspect, the targeting moiety polypeptide comprises Nivolumab or pembrolizumab. In a further aspect, this antibody is atezolizumab or avelumab or durvalumab.

[0045] In one aspect, the targeting moiety comprises a polypeptide that binds IL-6R, the first immunomodulatory moiety comprises the ECD or ligand binding fragment thereof of PD-1, and the second immunomodulatory moiety comprises the ECD or ligand binding fragment thereof of TGFβRII. In one aspect, the molecule comprises SEQ ID NO: 213 and SEQ ID NO: 214. In another aspect, the targeting moiety comprises a polypeptide that binds IL-6R, the first immunomodulatory moiety comprises the ECD or ligand binding fragment thereof of PD-1, and the second immunomodulatory moiety comprises the ECD or ligand binding fragment thereof of TIM-3. In one aspect, the molecule comprises SEQ ID NO: 217 and SEQ ID NO: 218. In one aspect, the molecule comprises SEQ ID NO: 219 and SEQ ID NO: 220. In another aspect, the targeting moiety comprises a polypeptide that binds IL-6R, the first immunomodulatory moiety comprises the ECD or ligand binding fragment thereof of TIM-3, and the second immunomodulatory moiety comprises the ECD or ligand binding fragment thereof of TGFβRII. In one aspect, the molecule comprises SEQ ID NO: 215 and SEQ ID NO: 216. In a further aspect, the targeting moiety polypeptide comprises an antibody that binds IL-6R. In a further aspect, this antibody comprises tocilizumab.

[0046] In one aspect, the targeting moiety comprises a polypeptide that binds VEGF, the first immunomodulatory moiety comprises the ECD or ligand binding fragment thereof of PD-1, and the second immunomodulatory moiety comprises the ECD or ligand binding fragment thereof of TGFβRII. In one aspect, the molecule comprises SEQ ID NO: 249 and SEQ ID NO: 250. In another aspect, the targeting moiety comprises a polypeptide that binds VEGF, the first immunomodulatory moiety comprises the ECD or ligand binding fragment thereof of PD-1, and the second immunomodulatory moiety comprises the ECD or ligand binding fragment thereof of TIM-3. In one aspect, the molecule comprises SEQ ID NO: 253 and SEQ ID NO: 254. In one aspect, the molecule comprises SEQ ID NO: 255 and SEQ ID NO: 256. In another aspect, the targeting moiety comprises a polypeptide that binds VEGF, the first immunomodulatory moiety comprises the ECD or ligand binding fragment thereof of TIM-3, and the second immunomodulatory moiety comprises the ECD or ligand binding fragment thereof of TGFβRII. In one aspect, the molecule comprises SEQ ID NO: 251 and SEQ ID NO: 252. In a further aspect, the targeting moiety polypeptide comprises Bevacizumab. In a further aspect, targeting moiety comprises a ligand binding ectodomain of VEGFR. In a further aspect, targeting moiety comprises aflibercept.

[0047] In one aspect, the targeting moiety comprises a polypeptide that binds EGFR, the first immunomodulatory moiety comprises the ECD or ligand binding fragment thereof of PD-1, and the second immunomodulatory moiety comprises the ECD or ligand binding fragment thereof of TGFβRII. In one aspect, the molecule comprises SEQ ID NO: 225 and SEQ ID NO: 226. In another aspect, the targeting moiety comprises a polypeptide that binds EGFR, the first immunomodulatory moiety comprises the ECD or ligand binding fragment thereof of PD-1, and the second immunomodulatory moiety comprises the ECD or ligand binding fragment thereof of TIM-3. In one aspect, the molecule comprises SEQ ID NO: 229 and SEQ ID NO: 230. In one aspect, the molecule comprises SEQ ID NO: 231 and SEQ ID NO: 232. In another aspect, the targeting moiety comprises a polypeptide that binds EGFR, the first immunomodulatory moiety comprises the ECD or ligand binding fragment thereof of TIM-3, and the second immunomodulatory moiety comprises the ECD or ligand binding fragment thereof of TGFβRII. In one aspect, the molecule comprises SEQ ID NO: 227 and SEQ ID NO: 228. In a further aspect, the targeting moiety polypeptide comprises Cetuximab or Panitumumab or Necitumumab.

[0048] In one aspect, the targeting moiety comprises a polypeptide that binds HER2/Neu, the first immunomodulatory moiety comprises the ECD or ligand binding fragment thereof of PD-1, and the second immunomodulatory moiety comprises the ECD or ligand binding fragment thereof of TGFβRII. In one aspect, the molecule comprises SEQ ID NO: 237 and SEQ ID NO: 238. In another aspect, the targeting moiety comprises a polypeptide that binds HER2, the first immunomodulatory moiety comprises the ECD or ligand binding fragment thereof of PD-1, and the second immunomodulatory moiety comprises the ECD or ligand binding fragment thereof of TIM-3. In one aspect, the molecule comprises SEQ ID NO: 243 and SEQ ID NO: 244. In one aspect, the molecule comprises SEQ ID NO: 241 and SEQ ID NO: 242. In another aspect, the targeting moiety comprises a polypeptide that binds HER2, the first immunomodulatory moiety comprises the ECD or ligand binding fragment thereof of TIM-3, and the second immunomodulatory moiety comprises the ECD or ligand binding fragment thereof of TGFβRII. In one aspect, the molecule comprises SEQ ID NO: 239 and SEQ ID NO: 240. In a further aspect, the targeting moiety polypeptide comprises Trastuzumab or Pertuzumab.

[0049] In one aspect, the targeting moiety comprises a polypeptide that binds HIV gp120, the first immunomodulatory moiety comprises the ECD or ligand binding fragment thereof of PD-1, and the second immunomodulatory moiety comprises the ECD or ligand binding fragment thereof of TGFβRII. In one aspect, the molecule comprises SEQ ID NO: 261 and SEQ ID NO: 262. In another aspect, the targeting moiety comprises a polypeptide that binds gp120, the first immunomodulatory moiety comprises the ECD or ligand binding fragment thereof of PD-1, and the second immunomodulatory moiety comprises the ECD or ligand binding fragment thereof of TIM-3. In one aspect, the molecule comprises SEQ ID NO: 265 and SEQ ID NO: 266. In one aspect, the molecule comprises SEQ ID NO: 267 and SEQ ID NO: 268. In another aspect, the targeting moiety comprises a polypeptide that binds gp120, the first immunomodulatory moiety comprises the ECD or ligand binding fragment thereof of TIM-3, and the second immunomodulatory moiety comprises the ECD or ligand binding fragment thereof of TGFβRII. In one aspect, the molecule comprises SEQ ID NO: 263 and SEQ ID NO: 264. In a further aspect, the targeting moiety polypeptide comprises Trastuzumab or Pertuzumab.

[0050] In a further embodiment, the present invention provides fusion proteins comprising the extracellular binding domain (ECD) or ligand binding fragment thereof of TIM-3 and the ECD or ligand binding fragment thereof of TGFRβII, PD-1, BTLA, LIGHT, CD226 or VSIG8. In one aspect, the fusion protein comprises the ECD or ligand binding fragment thereof of TIM-3 and the ECD or ligand binding fragment thereof of TGFβRII. In certain aspects, the fusion protein comprises the sequence of SEQ ID NO: 190. In another aspect, the fusion protein comprises the ECD or ligand binding fragment thereof of TIM-3 and the ECD or ligand binding fragment thereof of PD-1. In specific aspects, the fusion protein comprises the sequence of SEQ ID NO: 195, 196 or 197. In a further aspect, the fusion protein comprises an Fc. In a further aspect, the TIM-3 ECD and the other ECD are attached with a linker. In certain aspects, the linker has the sequence of SEQ ID NO 3, 4, or 5.

[0051] In one embodiment, the present invention provides for compositions comprising the previously described molecule or fusion protein and a pharmaceutical carrier.

[0052] In an additional embodiment, the present invention provides a method of treating a subject having cancer or an infectious disease comprising administering to the subject the previously described molecules, fusion proteins or compositions. In one aspect, the molecule, fusion protein or composition is administered by intracutaneous, subcutaneous, intravenous, intraperitoneal, intraarterial, intrathecal, intracapsular, intraorbital, intracardiac, intradermal, transdermal, transtracheal, subcuticular, intraarticulare, subcapsular, subarachnoid, intraspinal and intrasternal , oral, sublingual buccal, rectal, vaginal, nasal or ocular administrations, by infusion, inhalation, or nebulization or by parenteral administration.

[0053] In another aspect, the cancer is Lung cancer, Breast cancer, Colorectal cancer, Prostate cancer, Stomach cancer, Liver cancer, Cervical cancer, Esophageal cancer, Bladder cancer, Non-Hodgkin lymphoma, Leukemia, Pancreatic cancer, Kidney cancer, endometrial cancer, Head and Neck Cancer (HNSCC), Lip cancer, oral cancer, Thyroid cancer, Brain cancer, Ovary cancer, Melanoma, Gallbladder cancer, Laryngeal cancer, Multiple myeloma, Nasopharyngeal cancer, Hodgkin lymphoma, Testis cancer or Kaposi sarcoma.

[0054] In an additional aspect, the infectious pathogen or disease is HIV/AIDS, Herpes Simplex Virus/Herpes, Human Papilloma Virus, Hepatitis B or C Virus/Hepatitis, Epstein Barr Virus (EBV), Borrelia burgdorferi/Lyme disease, Influenza, Mycobacterium tuberculosis/Tuberculosis, Mycobacteria leprae,/Leprosy, Malaria, Syphilis, Gonorrhea, or Klebsiella Pneumoniae/Pneumonia.

[0055] In a further embodiment, a chemotherapeutic agent, immunosuppressive agent or antibiotic is administered simultaneously with, before or following the administration of the molecule, fusion protein or composition.

### BRIEF DESCRIPTION OF THE DRAWINGS

[0056] FIG. 1. Schematic representation of autocrine/paracrine receptor-ligand interactions that inhibit T cell activation and induce immune tolerance and T cell exhaustion. Autocrine/paracrine TGFβ induces expression of FOXP3, the signature transcription factor of the Treg lineage. FOXP3 induces expression of CTLA-4, a T cell inhibitory receptor which restrains T cell costimulation by interfering with B7-CD28 interaction. Tregs express Galectin-9, a ligand that engages TIM-3 and triggers exhaustion or apoptosis of effector T cells by the TIM-3/CEACAM-1 co-inhibitory axis. Engagement of PD-1 by PD-L1 promotes TGFβ-induced expression of FOXP3 to induce and maintain Tregs, and cooperates with TIM-3/CEACAM-1 signaling to induce T cell exhaustion and death.

[0057] FIGS. 2A-C. α-PDL1-TIM3ecd and α-PD1-TIM3ecd counteract immune tolerance and T cell exhaustion by simultaneously interrupting PD-L1/PD-1 signaling and the TIM-3/CEACAM-1 co-inhibitory axis. (A) Schematic representation of the structure and targets of α-PDL1-TIM3ecd and α-PD1-TIM3ecd. α-PD1-TIM3ecd comprises: (i) Heavy chain of a human α-PD-1 antibody fused at the C-terminus to a ligand-binding IgV ectodomain sequence of TIM-3 via a flexible linker peptide, (GGGGS)₃ (SEQ ID NO: 53) and (ii) Light chain of a human α-PD-1 antibody (SEQ ID NO: 187). α-PDL1-TIM3ecd comprises: (i) Heavy chain of a human α-PD-L1 antibody fused at the C-terminus to a ligand-binding IgV ectodomain sequence of TIM-3 via a flexible linker peptide, (GGGGS)₃ (SEQ ID NO: 51) and (ii) Light chain of a human α-PD-L1 antibody (SEQ ID NO:185) .(B) Schematic representation of the targets and mechanisms by which α-PDL1-TIM3ecd and α-PD1-TIM3ecd disrupt autocrine/paracrine receptor-ligand interactions that inhibit T cell activation and induce T cell exhaustion. Autocrine/paracrine TGFβ induces expression of FOXP3, the signature transcription factor of the Treg lineage. FOXP3 induces expression of CTLA-4, a T cell inhibitory receptor which restrains T cell costimulation by interfering with B7-CD28 interaction. Tregs express Galectin-9, a ligand that engages TIM-3 and triggers exhaustion or apoptosis of effector T cells by the TIM-3/CEACAM-1 co-inhibitory axis. Engagement of PD-1 by PD-L1 promotes TGFβ-induced expression of FOXP3 to induce and maintain Tregs, and cooperates with TIM-3/CEACAM-1 signaling to induce T cell exhaustion and death. α-PDL1-TIM3ecd and α-PD1-TIM3ecd disable PD-1/PD-L1 signaling and simultaneously disrupt cis/trans interactions involving the TIM-3 and CEACAM-1 co-inhibitory pathways.(C) Schematic representation of the mechanism by which α-PDL1-TIM3ecd and α-PD1-TIM3ecd simultaneously counteract multipronged suppression of T cells via the PD-L1/PD-1 and TIM-3/CEACAM-1 co-inhibitory axes. α-PDL1-TIM3ecd and α-PD1-TIM3ecd interrupt PD-L1/PD-1 interaction and simultaneously disrupt: (i) heterophilic TIM-3/CEACAM-1 interactions (cis CEACAM-1/TIM-3 heterodimerization; trans CEACAM1 heterodimerization with TIM-3); (ii) homophilic CEACAM-1/CEACAM-1 interactions (cis CEACAM-1 dimerization; trans CEACAM1-induced cis CEACAM-1 dimerization).

[0058] FIGS. 3A-D. Characterization and target-binding ability of α-PDL1-TIM3ecd and α-PD1-TIM3ecd. (A) SDS-PAGE under reducing (R) and non-reducing (NR) conditions was used to compare the full-length (FL), heavy chain (HC) and light chain (LC) of α-PD1-TIM3ecd and α-PD1 antibody (nivolumab). SDS-PAGE confirmed the expected higher molecular weight of the heavy chain of α-PD1-TIM3ecd compared to the heavy chain of α-PD1 antibody (Top panel). SDS-PAGE under reducing (R) and non-reducing (NR) conditions was used to compare the full-length (FL), heavy chain (HC) and light chain (LC) of α-PDL1-TIM3ecd and α-PDL1 antibody (atezolizumab). SDS-PAGE confirmed the expected higher molecular weight of the heavy chain of α-PDL1-TIM3ecd compared to the heavy chain of α-PDL1 antibody (Bottom panel). (B) ELISA showing binding of α-PD1-TIM3 to rhPD-1 (Top panel): Biotinylated rhPD-1 (0-250 ng/ml) was added to plates coated with α-PD1-TIM3ecd (1 μg/ml). ELISA showing binding of α-PDL1-TIM3 to rhPD-L1 (Bottom panel): Biotinylated rhPD-L1 (0-250 ng/ml) was added to plates coated with either α-PDL1-TIM3 (1 μg/ml) or α-PDL1 antibody (atezolizumab)(positive control). (C) α-PD1-TIM3ecd and α-PDL1-TIM3ecd bind recombinant human (rh) CEACAM-1 in vitro. rhCEACAM-1 (5 μg) was incubated (overnight, 4° C.) in the presence or absence of α-PD1-TIM3ecd, α-PDL1-TIM3ecd, a-gp120-TIM3ecd, α-PD-L1 mAb (atezolizumab), or α-PD1 mAb (nivolumab) (10 μg each), followed by incubation with protein A-agarose beads (10 μl) for 6 h, and then immunoprecipitated with protein A-agarose beads. The precipitated complexes were washed with immunoprecipitation buffer, re-suspended in NuPAGE sample buffer with reducing agent, boiled, resolved on a Bis-Tris Criterion XT Gel system and transferred to a PVDF membrane. Membranes were immunoblotted with primary antibodies [CEACAM1 (D1P4T); TIM3 (D5D5R™)] overnight, washed, incubated with secondary antibodies and visualized by Amersham ECL Western Blotting Detection Reagents. Immunoblot analyses detected rhCEACAM-1 in α-PD1-TIM3ecd, α-PDL1-TIM3ecd, and α-gp120-TIM3ecd protein A-pulled down immunoprecipitates, but not in immunoprecipitates of α-PD-L1 mAb (atezolizumab), or α-PD1 mAb (nivolumab). (D) α-PD1-TIM3ecd and α-PDL1-TIM3ecd bind CEACAM-1 on co-stimulated human T cells. Human PBMC were co-stimulated with anti-CD³/anti-CD28 beads in the presence of α-PD1-TIM3 ecd, α-PDL1-TIM3ecd, α-PD-L1 mAb (atezolizumab), or α-PD1 mAb (nivolumab) for 6d. Cell lysates were immunoprecipitated with protein A-agarose beads (10 μl) for 6 h. The precipitated complexes were washed with immunoprecipitation buffer, re-suspended in NuPAGE sample buffer with reducing agent, boiled, resolved on a Bis-Tris Criterion XT Gel system and transferred to a PVDF membrane. Membranes were immunoblotted with primary antibodies [CEACAM1 (D1P4T); TIM3 (D5D5R™)] overnight, washed, incubated with secondary antibodies and visualized by Amersham ECL Western Blotting Detection Reagents. Immunoblot analyses with the CEACAM-1 antibody detected CEACAM-1 in protein A-immunoprecipitates of α-PD1-TIM3ecd and α-PDL1-TIM3ecd treated cell lysates, but not in immunoprecipitates of α-PD-L1 mAb (atezolizumab), or α-PD1 mAb (nivolumab) treated cell lysates. Immunoblot analyses with the TIM-3ecd antibody detected the heavy chain of α-PD1-TIM3ecd or α-PDL1-TIM3ecd in protein A-immunoprecipitates of α-PD1-TIM3ecd and α-PDL1-TIM3ecd treated cell lysates, but not in immunoprecipitates of α-PD-L1 mAb (atezolizumab), or α-PD1 mAb (nivolumab) treated cell lysates.

[0059] FIGS. 4A-C. α-PD1-TIM3ecd and α-PDL1-TIM3ecd are significantly more effective than α-PD-1 mAb or α-PD-L1 mAb in promoting IFNγ expression and counteracting exhaustion of co-stimulated T cells.

[0060] (A) Human PBMCs were stimulated with anti-CD3/anti-CD28 beads (5 μl/ml) and rhIL-2, in the presence or absence of α-PD1-TIM3ecd, α-PDL1-TIM3ecd, α-PD-L1 mAb (atezolizumab), α-PD1 mAb (nivolumab), a-human TIM3 Ab (F38-2E2), or the combination of α-PD1 mAb and a-TIM3 Ab (5 μg/ml each) for 3-9d. Interferon-γ (IFN-γ) in cell supernatants at each indicated time (3d, 6d, and 9d) was quantified by ELISA (Data represent mean±SEM of 3 in vitro replicates for each group). ELISA demonstrated that α-PDL1-TIM3ecd and α-PD1-TIM3ecd are significantly more effective in promoting IFNγ expression and counteracting exhaustion of co-stimulated T cells in vitro compared to either α-PDL1 (atezolizumab), α-PD-1 (pembrolizumab), α-TIM3 Ab, or even the combination of α-PD1 mAb and α-TIM3 Ab. (B) Human PBMCs were stimulated with anti-CD³/anti-CD28 beads (5 μl/ml) and rhIL-2, in the presence or absence of α-PD1-TIM3ecd, α-PDL1-TIM3ecd, α-PD-L1 mAb (atezolizumab), α-PD1 mAb (nivolumab), α-human TIM3 Ab (F38-2E2), or the combination of α-PD1 mAb and α-TIM3 Ab (5 μg/ml each) for 16 h or 40 h, and IFN-γ in cell supernatants was quantified by ELISA (mean±SEM of 3 in vitro replicates/group). α-PDL1-TIM3ecd is significantly more effective in promoting IFNγ expression by co-stimulated T cells in vitro compared to either α-PDL1 (atezolizumab), α-PD-1 (pembrolizumab), α-TIM3 Ab, or even the combination of α-PD1 mAb and α-TIM3 Ab [data represent the fold-change in IFNγ expression in each antibody-treated group compared to co-stimulation without antibody)]. (C) α-PD1-TIM3ecd counteracts TGFβ mediated suppression of IFNγ expression in co-stimulated T cells. Human PBMCs were stimulated with anti-CD³/anti-CD28 and rhIL-2 in the presence or absence of rhTGFIβ1 (5 ng/ml) with or without either α-PDL1-TIM3 (5 μg/ml) for 16 h or 40 h, and Interferon-γ (IFN-γ) in cell supernatants was quantified by ELISA (Data represent mean±SEM of 3 in vitro replicates for each group).

[0061] FIGS. 5A-B. α-PD1-TIM3ecd inhibits tumor growth more effectively than a-PD-1, a-TIM-3 or the combination of a-TIM-3 and α-PD1(A) NSG mice (NOD/Shi-scid IL-2rgnull)(4-8 weeks) were reconstituted with adoptive transfer of 3×106 human peripheral blood mononuclear cells (PBMCs) [that were costimulated with anti-CD³/anti-CD28 beads (5 μl/ml) and rhIL-2 in the presence of the following specified treatments for 8 days (5 μg/ml each): α-PD1-TIM3ecd, α-PD1 mAb (nivolumab), a-human TIM3 Ab (F38-2E2), combination of α-PD1 mAb and a-TIM3 Ab, or vehicle alone. Reconstituted mice were injected subcutaneously with 2×106 D-MUT1 human colorectal cancer cells, and each group was treated in vivo (5 mg/kg i.p. every 5 days) with the same treatment used for in vitro treatment of PBMCs used for adoptive transfer, as indicated: α-PD1-TIM3ecd; α-PD1 (nivolumab); a-TIM-3 (F38-2E2); combination of α-PD1 and a-TIM-3; vehicle alone (untreated control) [≥5 mice/group]. Tumor size was measured blinded to the treatment group and tumor volume was calculated using the formula (length×width×height). In vivo tumor growth curves (mean+SEM) are shown. p values were derived using unpaired, two-sided t-test. The p value (p<0.02, Student's unpaired t-test) denotes significant difference between α-PD1-TIM3ecd and each other treatment group. (B) Immune deficient NSG mice (NOD/Shi-scid IL-2rgnull)(4-8 weeks) were irradiated at 200 cGy, and immune reconstituted by adoptive transfer of HLA A2-matched human CD34+.hematopoietic cells. Reconstituted humanized mice were injected subcutaneously with human Triple Negative Breast Cancer (TNBC) HLA A2+ tumor cells (MDA-MB-231-Luc)(1×106 in matrigel; mammary fat pad). At 3d following tumor inoculation, mice were randomized and treated with either vehicle alone (untreated control) or the following antibodies (5 mg/kg i.p. weekly): a-PD1-TIM3ecd, a-PD1 mAb (nivolumab), a-human TIM3 Ab (F38-2E2), combination of a-PD1 mAb and a-TIM3 Ab [≥5 mice/group]. Tumor size was measured blinded to the treatment group and tumor volume was calculated using the formula (length×width×height). In vivo tumor growth curves (mean±SEM) are shown. p values were derived using unpaired, two-sided t-test. The p value (p<0.02, Student's unpaired t-test) denotes significant difference between α-PD1-TIM3ecd and each other treatment group.

[0062] FIGS. 6A-C. α-PDL1-TIM3ecd inhibits tumor growth more effectively than a-PD-L1, a-PD-1, a-TIM-3 or the combination of a-PD-L1 and a-TIM-3.Immune deficient NSG mice (NOD/Shi-scid IL-2rg^{null})(4-8 weeks) were irradiated at 200 cGy, and immune reconstituted by adoptive transfer of HLA A2 human CD34⁺.hematopoietic cells. Reconstituted humanized mice were injected subcutaneously with human Triple Negative Breast Cancer (TNBC) HLA A2+ tumor cells (MDA-MB-231-Luc)(1×10⁶ in matrigel; mammary fat pad). At 3d following tumor inoculation, mice were randomized and treated with either vehicle alone (untreated control) or the following antibodies (5 mg/kg i.p. weekly): α-PDL1-TIM3ecd, α-PD1 mAb (atezolizumab), α-PD1 mAb (pembrolizumab), α-human TIM3 Ab (F38-2E2), combination of α-PD-L1 mAb and α-TIM3 Ab [≥5 mice/group]. (A) Tumor size was measured blinded to the treatment group and tumor volume was calculated using the formula (length x width x height). In vivo tumor growth curves (mean±SEM) are shown. p values were derived using unpaired, two-sided t-test. The p value (p<0.02, Student's unpaired t-test) denotes significant difference between α-PDL1-TIM3ecd and each other treatment group. (B) Bioluminescence assay of primary tumors in untreated controls or the indicated treatment groups at 7 and 27 d after tumor cell inoculation. (C) Quantification of T cell density in tumors: Tumor volume and flow cytometry was used to assess the absolute number of CD4+ and CD8+ T cells per mm³ of tumor.

[0063] FIGS. 7A-B. Schematic design of multifunctional antibody-ligand traps of this invention comprising a targeting antibody that binds a target epitope, ligand-binding IgV ectodomain sequence of TIM-3 (TIM-3ecd), and ligand-binding ectodomain sequence of PD-1 (PD-1ecd). The multifunctional antibody-ligand traps can bind a target epitope (via the antigen-binding CDR), bind PD-1 ligands, PD-L1 and PD-L2 (via the PD-1ecd) and TIM-3 ligands (CEACAM-1)(via the TIM-3ecd). (A) Schematic design of multifunctional antibody-ligand traps of this invention comprising a targeting antibody, wherein the heavy chain of the antibody is fused at the C-terminus to a ligand-binding IgV ectodomain sequence of TIM-3 (TIM-3ecd: SEQ ID NO: 2) via a linker, and the light chain of the antibody is fused at the C-terminus to a ligand-binding ectodomain sequence of PD-1 (PD-1ecd: SEQ ID NO: 7) via a linker. In one aspect, the linker is a peptide, (GGGGS)ₙ (SEQ ID NO: 3).(B) Schematic design of multifunctional antibody-ligand traps of this invention comprising a targeting antibody, wherein the heavy chain of the antibody is fused at the C-terminus to a ligand-binding ectodomain sequence of PD-1 (PD-1ecd: SEQ ID NO: 7) via a linker peptide, and the light chain of the antibody is fused at the C-terminus to a ligand-binding ectodomain sequence of TIM-3 (TIM-3ecd: SEQ ID NO: 2) via a linker peptide. In one aspect, the linker is a peptide, (GGGGS)ₙ (SEQ ID NO: 3). In various embodiments, the targeting antibody of the multifunctional antibody-ligand traps of this invention binds one of the following molecules: Cytotoxic T lymphocyte associated antigen-4 (CTLA-4, CD152), B7-H3 (CD276), V domain Ig suppressor of T cell activation (VISTA), VSIG8, B and T lymphocyte attenuator (BTLA), Herpesvirus Entry Mediator (HVEM), CD160, T cell Ig and ITM domain (TIGIT), CD226, CD96, Lymphocyte activation gene-3 (LAG-3), transforming growth factor β (TGF-β), transforming growth factor β receptor (TGFβR), 4-1BB (CD137), Inducible T-Cell Costimulator (ICOS), OX-40 (CD134), glucocorticoid-induced TNFR-related protein (GITR), IL6R, IL23R, IL17R, IL-6, IL-23, IL-17, CD39, CD73, CCR4, CCR5, CXCR4, IL12R, CD4, CD25, CD3, epidermal growth factor receptor (EGFR, EGFR1, ErbB-1, HER1), ErbB-2 (HER2/neu), ErbB-3/HER3, ErbB-4/HER4, EGFR ligand, Vascular endothelial growth factor (VEGF), VEGFR (VEGFR1, VEGFR2), RANK ligand (RANKL), RANK, gp120.

[0064] FIGS. 8A-B. Schematic design of multifunctional antibody-ligand traps of this invention comprising a targeting antibody that binds CTLA-4, ligand-binding IgV ectodomain sequence of TIM-3 (TIM-3ecd), and ligand-binding ectodomain sequence of PD-1 (PD-1ecd). The multifunctional antibody-ligand traps can bind CTLA-4 (via the antigen-binding CDR), bind PD-1 ligands, PD-L1 and PD-L2 (via the PD-1ecd) and TIM-3 ligands (CEACAM-1)(via the TIM-3ecd). (A) Schematic design of multifunctional antibody-ligand traps of this invention comprising a targeting antibody that binds CTLA-4, wherein the heavy chain of the antibody is fused at the C-terminus to a ligand-binding IgV ectodomain sequence of TIM-3 via a linker peptide (SEQ ID NO: 207), and the light chain of the antibody is fused at the C-terminus to a ligand-binding ectodomain sequence of PD-1 via a linker peptide (SEQ ID NO: 208). In one aspect, the linker is a peptide, (GGGGS)ₙ (SEQ ID NO: 3).(B) Schematic design of multifunctional antibody-ligand traps of this invention comprising a targeting antibody that binds CTLA-4, wherein the heavy chain of the antibody is fused at the C-terminus to a ligand-binding ectodomain sequence of PD-1 (SEQ ID NO: 205) via a linker peptide, and the light chain of the antibody is fused at the C-terminus to a ligand-binding ectodomain sequence of TIM-3 (SEQ ID NO: 206) via a linker peptide. In one aspect, the linker is a peptide, (GGGGS)ₙ (SEQ ID NO: 3).

[0065] FIG. 9. Schematic design of multifunctional antibody-ligand traps of this invention comprising a targeting antibody that binds a target epitope, ligand-binding IgV ectodomain sequence of TIM-3 (TIM-3ecd), and ligand-binding ectodomain sequence of TGFβRII (TGFβRIIecd). The multifunctional antibody-ligand traps can bind a target epitope (via the antigen-binding CDR), bind TGFβ (via the TGFβRIIecd) and TIM-3 ligands (CEACAM-1)(via the TIM-3ecd). In one embodiment, the multifunctional antibody-ligand traps of this invention comprise a targeting antibody, wherein the heavy chain of the antibody is fused at the C-terminus to a ligand-binding ectodomain sequence of TGFβRII (TGFβRIIecd) via a linker peptide (SEQ ID NO: 6), and the light chain of the antibody is fused at the C-terminus to a ligand-binding IgV ectodomain sequence of TIM-3 (TIM-3ecd: SEQ ID NO: 2) via a linker peptide. In one aspect, the linker is a peptide, (GGGGS)ₙ (SEQ ID NO: 3). In various embodiments, the targeting antibody of the multifunctional antibody-ligand traps of this invention binds one of the following molecules: Cytotoxic T lymphocyte associated antigen-4 (CTLA-4, CD152), Programmed Death-1 protein (PD-1), Programmed death ligand (PD-L1), Programmed death ligand (PD-L2), B7-H3 (CD276) ,V domain Ig suppressor of T cell activation (VISTA), VSIG8, B and T lymphocyte attenuator (BTLA), Herpesvirus Entry Mediator (HVEM), CD160, T cell Ig and ITM domain (TIGIT), CD226, CD96, Lymphocyte activation gene-3 (LAG-3) ,4-1BB (CD137), Inducible T-Cell Costimulator (ICOS), OX-40 (CD134), glucocorticoid-induced TNFR-related protein (GITR), IL6R, IL23R, IL17R, IL-6, IL-23, IL-17, CD39, CD73, CCR4, CCRS, CXCR4, IL12R, CD4, CD25, CD3, epidermal growth factor receptor (EGFR, EGFR1, ErbB-1, HER1), ErbB-2 (HER2/neu), ErbB-3/HER3, ErbB-4/HER4, EGFR ligand, Vascular endothelial growth factor (VEGF), VEGFR (VEGFR1, VEGFR2), RANK ligand (RANKL), RANK.

[0066] FIGS. 10A-C. Schematic design of multifunctional antibody-ligand traps of this invention comprising a targeting antibody that binds a T cell inhibitory receptor or ligand, ligand-binding IgV ectodomain sequence of TIM-3 (TIM-3ecd), and ligand-binding ectodomain sequence of TGFβRII (TGFβRIIecd).(A) Schematic design of multifunctional antibody-ligand traps of this invention comprising a targeting antibody that binds PD-1, ligand-binding IgV ectodomain sequence of TIM-3 (TIM-3ecd), and ligand-binding ectodomain sequence of TGFβRII (TGFβRIIecd). In one embodiment, the multifunctional antibody-ligand traps of this invention comprise a targeting antibody that binds PD-1, wherein the heavy chain of the antibody is fused at the C-terminus to a ligand-binding ectodomain sequence of TGFβRII (TGFβRIIecd)(SEQ ID NO: 6) via a linker peptide, and the light chain of the antibody is fused at the C-terminus to a ligand-binding IgV ectodomain sequence of TIM-3 (TIM-3ecd: SEQ ID NO: 2) via a linker peptide. In one aspect, the linker is a peptide, (GGGGS)ₙ (SEQ ID NO: 3). In one example, multifunctional antibody-ligand trap comprises a heavy chain corresponding to SEQ ID NO: 273 and a light chain corresponding to SEQ ID NO: 274 . In another example, multifunctional antibody-ligand trap comprises a heavy chain corresponding to SEQ ID NO: 277 and a light chain corresponding to SEQ ID NO: 278.(B) Schematic design of multifunctional antibody-ligand traps of this invention comprising a targeting antibody that binds PD-L1, ligand-binding IgV ectodomain sequence of TIM-3 (TIM-3ecd), and ligand-binding ectodomain sequence of TGFβRII (TGFβRIIecd). In one embodiment, the multifunctional antibody-ligand traps of this invention comprise a targeting antibody that binds PD-L1, wherein the heavy chain of the antibody is fused at the C-terminus to a ligand-binding ectodomain sequence of TGFβRII (TGFβRIIecd)(SEQ ID NO: 6) via a linker peptide, and the light chain of the antibody is fused at the C-terminus to a ligand-binding IgV ectodomain sequence of TIM-3 (TIM-3ecd: SEQ ID NO: 2) via a linker peptide. In one aspect, the linker is a peptide, (GGGGS)ₙ (SEQ ID NO: 3). In one example, multifunctional antibody-ligand trap comprises a heavy chain corresponding to SEQ ID NO: 285 and a light chain corresponding to SEQ ID NO: 285. In another example, multifunctional antibody-ligand trap comprises a heavy chain corresponding to SEQ ID NO: 281 and a light chain corresponding to SEQ ID NO: 282. (C) Schematic design of multifunctional antibody-ligand traps of this invention comprising a targeting antibody that binds CTLA-4, ligand-binding IgV ectodomain sequence of TIM-3 (TIM-3ecd), and ligand-binding ectodomain sequence of TGFβRII (TGFβRIIecd). In one embodiment, the multifunctional antibody-ligand traps of this invention comprise a targeting antibody that binds CTLA-4, wherein the heavy chain of the antibody is fused at the C-terminus to a ligand-binding ectodomain sequence of TGFβRII (TGFβRIIecd)(SEQ ID NO: 6) via a linker peptide, and the light chain of the antibody is fused at the C-terminus to a ligand-binding IgV ectodomain sequence of TIM-3 (TIM-3ecd: SEQ ID NO: 2) via a linker peptide. In one aspect, the linker is a peptide, (GGGGS)ₙ (SEQ ID NO: 3). In one example, multifunctional antibody-ligand trap comprises a heavy chain corresponding to SEQ ID NO: 203 and a light chain corresponding to SEQ ID NO: 204.

[0067] FIG. 11. Schematic design of multifunctional antibody-ligand traps of this invention comprising a targeting antibody that binds a target epitope, ligand-binding ectodomain sequence of PD-1 (PD-1ecd), and ligand-binding ectodomain sequence of TGFβRII (TGFβRIIecd). The multifunctional antibody-ligand traps can bind a target epitope (via the antigen-binding CDR), bind TGFβ (via the TGFβRIIecd) and PD-1 ligands, PD-L1 and PD-L2 (via the PD-1ecd). In one embodiment, the multifunctional antibody-ligand traps of this invention comprise a targeting antibody, wherein the heavy chain of the antibody is fused at the C-terminus to a ligand-binding ectodomain sequence of TGFβRII (TGFβRIIecd)(SEQ ID NO: 6) via a linker peptide, and the light chain of the antibody is fused at the C-terminus to ligand-binding ectodomain sequence of PD-1 (PD1ecd: SEQ ID NO: 7) via a linker peptide. In one aspect, the linker is a peptide, (GGGGS)ₙ (SEQ ID NO: 3). In various embodiments, the targeting antibody of the multifunctional antibody-ligand traps of this invention binds one of the following molecules: Cytotoxic T lymphocyte associated antigen-4 (CTLA-4, CD152), T-cell immunoglobulin and mucin-domain containing-3 (TIM-3), CEACAM-1, Carcinoembryonic Antigen (CEA),V domain Ig suppressor of T cell activation (VISTA), VSIG8, B and T lymphocyte attenuator (BTLA), Herpesvirus Entry Mediator (HVEM), CD160, T cell Ig and ITM domain (TIGIT), CD226, CD96, Lymphocyte activation gene-3 (LAG-3), 4-1BB (CD137), Inducible T-Cell Costimulator (ICOS), OX-40 (CD134), glucocorticoid-induced TNFR-related protein (GITR), IL6R, IL23R, IL17R, IL-6, IL-23, IL-17, CD39, CD73, CD122, CCR4, CCR5, CXCR4, IL12R, CD4, CD25, CD3, epidermal growth factor receptor (EGFR, EGFR1, ErbB-1, HER1), ErbB-2 (HER2/neu), ErbB-3/HER3, ErbB-4/HER4, EGFR ligand, Vascular endothelial growth factor (VEGF), VEGFR, RANK ligand (RANKL), RANK.

[0068] FIG. 12. In various embodiments, multifunctional antibody-ligand traps of this invention comprises a targeting antibody that binds a T cell inhibitory receptor or ligand, ligand-binding ectodomain sequence of PD-1 (PD-1ecd), and ligand-binding ectodomain sequence of TGFβRII (TGFβRIIecd). In one embodiment, the multifunctional antibody-ligand traps of this invention comprise a targeting antibody that binds CTLA-4, wherein the heavy chain of the antibody is fused at the C-terminus to a ligand-binding ectodomain sequence of TGFβRII (TGFβRIIecd)(SEQ ID NO: 203) via a linker peptide, and the light chain of the antibody is fused at the C-terminus to a ligand-binding ectodomain sequence of PD-1 (PD-1ecd: SEQ ID NO: 202) via a linker peptide. In one aspect, the linker is a peptide, (GGGGS)ₙ (SEQ ID NO: 3). In one example, multifunctional antibody-ligand trap comprises a heavy chain corresponding to SEQ ID NO: 202 and a light chain corresponding to SEQ ID NO: 203.

[0069] FIGS. 13A-B are polypeptide sequences. A. Human TIM-3/HAVCR2 protein sequence, SEQ ID NO: 1. B. Human TIM-3/HAVCR2 Extracellular Domain (ECD) protein, sequence SEQ ID NO: 2.

[0070] FIGS. 14A-D are polypeptide sequences. A. Linker sequence SEQ ID NO: 3. B. Linker sequence SEQ ID NO: 144. C. Linker sequence SEQ ID NO: 4. D. Linker sequence SEQ ID NO: 5.

[0071] FIGS. 15A-D are polypeptide sequences. A. TGFβ Receptor II extracellular domain protein sequence, SEQ ID NO: 6. B. PD-1 extracellular domain protein sequence, SEQ ID NO: 7. C. BTLA extracellular domain protein sequence, SEQ ID NO: 8. D. CD226 extracellular domain protein sequence, SEQ ID NO: 9.

[0072] FIG. 16A-B are polypeptide sequences. A. Anti-VISTA heavy chain+TGFβRII ECD fusion sequence, SEQ ID NO: 10. B. Anti-VISTA light chain protein sequence, SEQ ID NO: 145.

[0073] FIG. 17A- are polypeptide sequences. A. Anti-VISTA heavy chain+PD-1 ECD fusion sequence, SEQ ID NO: 11. B. Anti-VISTA light chain protein sequence, SEQ ID NO: 146.

[0074] FIG. 18A-B are polypeptide sequences. A. Anti-VISTA heavy chain+TIM-3 ECD fusion sequence, SEQ ID NO: 12. B. Anti-VISTA light chain protein sequence, SEQ ID NO: 147.

[0075] FIG. 19A-B are polypeptide sequences. A. Anti-VISTA heavy chain+BTLA ECD fusion sequence, SEQ ID NO: 13. B. Anti-VISTA light chain protein sequence, SEQ ID NO: 148.

[0076] FIG. 20A- are polypeptide sequences. A. Anti-VISTA heavy chain+CD226 ECD fusion sequence, SEQ ID NO: 14. B. Anti-VISTA light chain protein sequence, SEQ ID NO: 149.

[0077] FIG. 21A-B are polypeptide sequences. A. Anti-TIGIT heavy chain+TGFβRII ECD fusion sequence, SEQ ID NO: 15. B. Anti-TIGIT light chain protein sequence, SEQ ID NO: 150.

[0078] FIG. 22A-B are polypeptide sequences. A. Anti-TIGIT heavy chain+PD-1 ECD fusion protein sequence, SEQ ID NO: 16. B. Anti-TIGIT light chain protein sequence, SEQ ID NO: 151.

[0079] FIG. 23A-B are polypeptide sequences. A. Anti-TIGIT heavy chain+TIM-3 ECD fusion protein sequence, SEQ ID NO: 17. B. Anti-TIGIT light chain protein sequence, SEQ ID NO: 152.

[0080] FIG. 24A-B are polypeptide sequences. A. Anti-TIGIT heavy chain+BTLA ECD fusion protein sequence, SEQ ID NO: 18. B. Anti-TIGIT light chain protein sequence, SEQ ID NO: 153.

[0081] FIG. 25A-B are polypeptide sequences. A. Anti-TIGIT heavy chain+CD226 ECD fusion protein sequence, SEQ ID NO: 19. B. Anti-TIGIT light chain protein sequence, SEQ ID NO: 154.

[0082] FIG. 26A-B are polypeptide sequences A. Anti-BTLA heavy chain+TGFβRII ECD fusion protein sequence, SEQ ID NO: 20. B. Anti-BTLA light chain protein sequence, SEQ ID NO: 155.

[0083] FIG. 27A-B are polypeptide sequences. A. Anti-BTLA heavy chain+PD-1 ECD fusion protein sequence, SEQ ID NOSEQ ID NO: 21. B. Anti-BTLA light chain protein sequence, SEQ ID NO: 156.

[0084] FIG. 28A-B are polypeptide sequences. A. Anti-BTLA heavy chain+TIM-3 ECD fusion protein sequence, SEQ ID NO: 22. B. Anti-BTLA light chain protein sequence, SEQ ID NO: 157.

[0085] FIG. 29A- are polypeptide sequences. A. Anti-BTLA heavy chain+CD226 ECD fusion protein sequence, SEQ ID NO: 23. B. Anti-BTLA light chain protein sequence, SEQ ID NO: 158.

[0086] FIG. 30A-B are polypeptide sequences. A. Anti-LAG-3 heavy chain+TGFβRII ECD fusion protein sequence, SEQ ID NO: 24. B. Anti-LAG-3 light chain protein sequence, SEQ ID NO: 159.

[0087] FIG. 31A-B are polypeptide sequences. A. Anti-LAG-3 heavy chain+PD-1 ECD fusion protein sequence, SEQ ID NO: 25. B. Anti-LAG-3 light chain protein sequence, SEQ ID NO: 160.

[0088] FIG. 32A-B are polypeptide sequences. A. Anti-LAG-3 heavy chain+TIM-3 ECD fusion protein sequence, SEQ ID NO: 26. B. Anti-LAG-3 light chain protein sequence, SEQ ID NO: 161.

[0089] FIG. 33A-B are polypeptide sequences. A. Anti-LAG-3 heavy chain+BTLA ECD fusion protein sequence, SEQ ID NO: 27. B. Anti-LAG-3 light chain protein sequence, SEQ ID NO: 162.

[0090] FIG. 34A-B are polypeptide sequences. A. Anti-LAG-3 heavy chain+CD226 ECD fusion protein sequence, SEQ ID NO: 28. B. Anti-LAG-3 light chain protein sequence, SEQ ID NO: 163.

[0091] FIG. 35A-B are polypeptide sequences. A. Anti-CCR4 heavy chain+TGFβRII ECD fusion protein sequence, SEQ ID NO: 29. B. Anti-CCR4 light chain protein sequence, SEQ ID NO: 164.

[0092] FIG. 36A-B are polypeptide sequences. A. Anti-CCR4 heavy chain+PD-1 ECD fusion protein sequence, SEQ ID NO: 30. B. Anti-CCR4 light chain protein sequence, SEQ ID NO: 165.

[0093] FIG. 37A-B are polypeptide sequences. A. Anti-CCR4 heavy chain+TIM-3 ECD fusion protein sequence, SEQ ID NO: 31. B. Anti-CCR4 light chain protein sequence, SEQ ID NO: 166.

[0094] FIG. 38A-B are polypeptide sequences. A. Anti-CCR4 heavy chain+BTLA ECD fusion protein sequence, SEQ ID NO: 32. B. Anti-CCR4 light chain protein sequence, SEQ ID NO: 167.

[0095] FIG. 39A-B are polypeptide sequences. A. Anti-CCR4 heavy chain+CD226 ECD fusion protein sequence, SEQ ID NO: 33. B. Anti-CCR4 light chain protein sequence, SEQ ID NO: 168.

[0096] FIG. 40A-B are polypeptide sequences. A. Anti-PD1 heavy chain+BTLA ECD fusion protein sequence, SEQ ID NO: 34. B. Anti-PD-1 light chain protein sequence, SEQ ID NO: 169.

[0097] FIG. 41A-B are polypeptide sequences. A. Anti-PD1 heavy chain+CD226 ECD fusion protein sequence, SEQ ID NO: 35. B. Anti-PD-1 light chain protein sequence, SEQ ID NO: 170.

[0098] FIG. 42A-C are polypeptide sequences. A. Extracellular domain of CD44 protein sequence, SEQ ID NO: 36. B. Anti-PD1 heavy chain+CD44 ECD fusion protein sequence, SEQ ID NO: 37. C. Anti-PD-1 light chain protein sequence, SEQ ID NO: 171.

[0099] FIG. 43A-B are polypeptide sequences. A. Anti-CTLA-4 heavy chain+CD44 ECD fusion protein sequence, SEQ ID NO: 38. B. Anti-CTLA-4 light chain protein sequence, SEQ ID NO: 172.

[0100] FIG. 44A-B are polypeptide sequences. A. Anti-LAG-3 heavy chain+CD44 ECD fusion protein sequence, SEQ ID NO: 39. B. Anti-LAG-3 light chain protein sequence, SEQ ID NO: 173.

[0101] FIG. 45A-B are polypeptide sequences. A. Anti-TIGIT heavy chain+CD44 ECD fusion protein sequence, SEQ ID NO: 40. B. Anti-TIGIT light chain protein sequence, SEQ ID NO: 174.

[0102] FIG. 46A-B are polypeptide sequences. A. Anti-BTLA heavy chain+CD44 ECD fusion protein sequence, SEQ ID NO: 41. B. Anti-BTLA light chain protein sequence, SEQ ID NO: 175.

[0103] FIG. 47A-B are polypeptide sequences. A. Anti-VISTA heavy chain+CD44 ECD fusion protein sequence, SEQ ID NO: 42. B. Anti-VISTA light chain protein sequence, SEQ ID NO: 176.

[0104] FIG. 48A-B are polypeptide sequences. A. Anti-CCR4 heavy chain+CD44 ECD fusion protein sequence, SEQ ID NO: 43. B. Anti-CCR4 light chain protein sequence, SEQ ID NO: 177.

[0105] FIG. 49A-B are polypeptide sequences. A. Anti-CTLA-4 heavy chain+BTLA ECD fusion protein sequence, SEQ ID NO: 44. B. Anti-CTLA-4 light chain protein sequence, SEQ ID NO: 178.

[0106] FIG. 50A-B are polypeptide sequences. A. Anti-PD-1 heavy chain+BTLA ECD fusion protein sequence, SEQ ID NO: 45. B. Anti-PD-1 light chain protein sequence, SEQ ID NO: 179.

[0107] FIG. 51A-B are polypeptide sequences. A. Anti-PD-L1 heavy chain+BTLA ECD fusion protein sequence, SEQ ID NO: 46. B. Anti-PD-L1 light chain protein sequence, SEQ ID NO: 180.

[0108] FIG. 52A-B are polypeptide sequences. A. Anti-CTLA-4 heavy chain+CD226 ECD fusion protein sequence, SEQ ID NO: 47. B. Anti-CTLA-4 light chain protein sequence, SEQ ID NO: 181.

[0109] FIG. 53A-B are polypeptide sequences. A. Anti-PD-1 heavy chain+CD226 ECD fusion protein sequence, SEQ ID NO: 48. B. Anti-PD-1 light chain protein sequence, SEQ ID NO: 182.

[0110] FIG. 54A-B are polypeptide sequences. A. Anti-PD-L1 heavy chain+CD226 ECD fusion protein sequence, SEQ ID NO: 49. B. Anti-PD-L1 light chain protein sequence, SEQ ID NO: 183.

[0111] FIG. 55A-B are polypeptide sequences. A. Anti-CTLA-4 heavy chain+TIM-3 ECD fusion protein sequence, SEQ ID NO: 50. B. Anti-CTLA-4 light chain protein sequence, SEQ ID NO: 184.

[0112] FIG. 56A-B are polypeptide sequences. A. Anti-PD-L1 heavy chain+TIM-3 ECD fusion protein sequence, SEQ ID NO: 51. B. Anti-PD-L1 light chain protein sequence, SEQ ID NO: 185.

[0113] FIG. 57A-B are polypeptide sequences. A. Anti-PD-1 heavy chain+TIM-3 ECD fusion protein sequence, SEQ ID NO: 52. B. Anti-PD-1 light chain protein sequence, SEQ ID NO: 186.

[0114] FIG. 58A-B are polypeptide sequences A. Anti-PD-1 heavy chain+TIM-3 ECD fusion protein sequence, SEQ ID NO: 53. B. Anti-PD-1 light chain protein sequence, SEQ ID NO: 187.

[0115] FIG. 59A-D are polypeptide sequences. B. Human VSIG8 ECD protein sequence, SEQ ID NO: 55. C. Human VISTA protein sequence, SEQ ID NO: 56. B. Human VISTA ECD protein sequence, SEQ ID NO: 57.

[0116] FIG. 60A-B are polypeptide sequences. A. Anti-CTLA-4 heavy chain+VSIG8 ECD fusion protein sequence, SEQ ID NO: 58. B. Anti-CTLA-4 light chain protein sequence, SEQ ID NO: 188.

[0117] FIG. 61A-B are polypeptide sequences. A. Anti-CTLA-4 heavy chain+VSIG8 ECD fusion protein sequence, SEQ ID NO: 59. B. Anti-CTLA-4 light chain protein sequence, SEQ ID NO: 189.

[0118] FIG. 62A-B are polypeptide sequences A. Anti-IL6R heavy chain+TIM3 ECD fusion protein sequence, SEQ ID NO: 60. B. Anti-IL6R light chain protein sequence, SEQ ID NO: 61.

[0119] FIG. 63A- are polypeptide sequences. A. Anti-IL6R heavy chain+VISTA ECD fusion protein sequence, SEQ ID NO: 62. B. Anti-IL6R light chain protein sequence, SEQ ID NO: 63.

[0120] FIG. 64A-B are polypeptide sequences. A. Anti-IL6R heavy chain+VSIG8 ECD fusion protein sequence, SEQ ID NO: 64. B. Anti-IL6R light chain protein sequence, SEQ ID NO: 65.

[0121] FIG. 65A-B are polypeptide sequences A. Anti-IL6R heavy chain+CD44 ECD fusion protein sequence, SEQ ID NO: 66. B. Anti-IL6R light chain protein sequence, SEQ ID NO: 67.

[0122] FIG. 66A-B are polypeptide sequences. A. Anti-IL6R heavy chain+BTLA ECD fusion protein sequence, SEQ ID NO: 68. B. Anti-IL6R light chain protein sequence, SEQ ID NO: 69.

[0123] FIG. 67A-B are polypeptide sequences. A. Anti-IL6R heavy chain+CD226 ECD fusion protein sequence, SEQ ID NO: 70. B. Anti-IL6R light chain protein sequence, SEQ ID NO: 71.

[0124] FIG. 68A-B are polypeptide sequences A. Anti-IL6R heavy chain+LIGHT ECD fusion protein sequence, SEQ ID NO: 72. B. Anti-IL6R light chain protein sequence, SEQ ID NO: 73.

[0125] FIG. 69A-B are polypeptide sequences. A. Anti-EGFR heavy chain+TIM3 ECD fusion protein sequence, SEQ ID NO: 74. B. Anti-EGFR light chain protein sequence, SEQ ID NO: 75.

[0126] FIG. 70A-B are polypeptide sequences A. Anti-EGFR heavy chain+VISTA ECD fusion protein sequence, SEQ ID NO: 76. B. Anti-EGFR light chain protein sequence, SEQ ID NO: 77.

[0127] FIG. 71A-B are polypeptide sequences. A. Anti-EGFR heavy chain+VSIG8 ECD fusion protein sequence, SEQ ID NO: 78. B. Anti-EGFR light chain protein sequence, SEQ ID NO: 79.

[0128] FIG. 72A-B are polypeptide sequences. A. Anti-EGFR heavy chain+CD44 ECD fusion protein sequence, SEQ ID NO: 80. B. Anti-EGFR light chain protein sequence, SEQ ID NO: 81.

[0129] FIG. 73A-B are polypeptide sequences. A. Anti-EGFR heavy chain+BTLA ECD fusion protein sequence, SEQ ID NO: 82. B. Anti-EGFR light chain protein sequence, SEQ ID NO: 83.

[0130] FIG. 74A-B are polypeptide sequences A. Anti-EGFR heavy chain+CD226 ECD fusion protein sequence, SEQ ID NO: 84. B. Anti-EGFR light chain protein sequence, SEQ ID NO: 85.

[0131] FIG. 75A-B are polypeptide sequences. A. Anti-EGFR heavy chain+LIGHT ECD fusion protein sequence, SEQ ID NO: 86. B. Anti-EGFR light chain protein sequence, SEQ ID NO: 87.

[0132] FIG. 76A-B are polypeptide sequences. A. Anti-VEGF heavy chain+TIM3 ECD fusion protein sequence, SEQ ID NO: 88. B. Anti-VEGF light chain protein sequence, SEQ ID NO: 89.

[0133] FIG. 77A-B are polypeptide sequences. A. Anti-VEGF heavy chain+VISTA ECD fusion protein sequence, SEQ ID NO: 90. B. Anti-VEGF light chain protein sequence, SEQ ID NO: 91.

[0134] FIG. 78A-B are polypeptide sequences. A. Anti-VEGF heavy chain+VSIG8 ECD fusion protein sequence, SEQ ID NO: 92. B. Anti-VEGF light chain protein sequence, SEQ ID NO: 93.

[0135] FIG. 79A-B are polypeptide sequences 5. A. Anti-VEGF heavy chain+CD44 ECD fusion protein sequence, SEQ ID NO: 94. B. Anti-VEGF light chain protein sequence, SEQ ID NO: 95.

[0136] FIG. 80A-B are polypeptide sequences A. Anti-VEGF heavy chain+BTLA ECD fusion protein sequence, SEQ ID NO: 96. B. Anti-VEGF light chain protein sequence, SEQ ID NO: 97.

[0137] FIG. 81A-B are polypeptide sequences. A. Anti-VEGF heavy chain+CD226 ECD fusion protein sequence, SEQ ID NO: 98. B. Anti-VEGF light chain protein sequence, SEQ ID NO: 99.

[0138] FIG. 82A-B are polypeptide sequences. A. Anti-VEGF heavy chain+LIGHT ECD fusion protein sequence, SEQ ID NO: 100. B. Anti-VEGF light chain protein sequence, SEQ ID NO: 101.

[0139] FIG. 83A-B are polypeptide sequences. A. Anti-HER2 heavy chain+TIM3 ECD fusion protein sequence, SEQ ID NO: 102. B. Anti-HER2 light chain protein sequence, SEQ ID NO: 103.

[0140] FIG. 84A-B are polypeptide sequences. A. Anti-HER2 heavy chain+VISTA ECD fusion protein sequence, SEQ ID NO: 104. B. Anti-HER2 light chain protein sequence, SEQ ID NO: 105.

[0141] FIG. 85A-B are polypeptide sequences. A. Anti-HER2 heavy chain+VSIG8 ECD fusion protein sequence, SEQ ID NO: 106. B. Anti-HER2 light chain protein sequence, SEQ ID NO: 107.

[0142] FIG. 86A-B are polypeptide sequences. A. Anti-HER2 heavy chain+CD44 ECD fusion protein sequence, SEQ ID NO: 108. B. Anti-HER2 light chain protein sequence, SEQ ID NO: 109.

[0143] FIG. 87A-B are polypeptide sequences. A. Anti-HER2 heavy chain+BTLA ECD fusion protein sequence, SEQ ID NO: 110. B. Anti-HER2 light chain protein sequence, SEQ ID NO: 111.

[0144] FIG. 88A-B are polypeptide sequences A. Anti-HER2 heavy chain+CD226 ECD fusion protein sequence, SEQ ID NO: 112. B. Anti-HER2 light chain protein sequence, SEQ ID NO: 113.

[0145] FIG. 89A-B are polypeptide sequences A. Anti-HER2 heavy chain+LIGHT ECD fusion protein sequence, SEQ ID NO: 114. B. Anti-HER2 light chain protein sequence, SEQ ID NO: 115.

[0146] FIG. 90A-B are polypeptide sequences. A. Anti-41BB heavy chain+TIM3 ECD fusion protein sequence, SEQ ID NO: 116. B. Anti-41BB light chain protein sequence, SEQ ID NO: 117.

[0147] FIG. 91A-B are polypeptide sequences. A. Anti-41BB heavy chain+VISTA ECD fusion protein sequence, SEQ ID NO: 118. B. Anti-41BB light chain protein sequence, SEQ ID NO: 119.

[0148] FIG. 92A-B are polypeptide sequences. A. Anti-41BB heavy chain+VSIG8 ECD fusion protein sequence, SEQ ID NO: 120. B. Anti-41BB light chain protein sequence, SEQ ID NO: 121.

[0149] FIG. 93A-B are polypeptide sequences. A. Anti-41BB heavy chain+CD44 ECD fusion protein sequence, SEQ ID NO: 122. B. Anti-41BB light chain protein sequence, SEQ ID NO: 123.

[0150] FIG. 94A-B are polypeptide sequences 41BB light chain protein sequence, SEQ ID NO: 125.

[0151] FIG. 95A-B are polypeptide sequences. A. Anti-41BB heavy chain+CD226 ECD fusion protein sequence, SEQ ID NO: 126. B. Anti-41BB light chain protein sequence, SEQ ID NO: 127.

[0152] FIG. 96A-B are polypeptide sequences. A. Anti-41BB heavy chain+LIGHT ECD fusion protein sequence, SEQ ID NO: 128. B. Anti-41BB light chain protein sequence, SEQ ID NO: 129.

[0153] FIG. 97A-B are polypeptide sequences. A. Anti-IL23 heavy chain+TIM3 ECD fusion protein sequence, SEQ ID NO: 130. B. Anti-IL23 light chain protein sequence, SEQ ID NO: 131.

[0154] FIG. 98A-B are polypeptide sequences. A. Anti-IL23 heavy chain+VISTA ECD fusion protein sequence, SEQ ID NO: 132. B. Anti-IL23 light chain protein sequence, SEQ ID NO: 133.

[0155] FIG. 99A-B are polypeptide sequences. A. Anti-IL23 heavy chain+VSIG8 ECD fusion protein sequence, SEQ ID NO: 134. B. Anti-IL23 light chain protein sequence, SEQ ID NO: 135.

[0156] FIG. 100A-B are polypeptide sequences. A. Anti-IL23 heavy chain+CD44 ECD fusion protein sequence, SEQ ID NO: 136. B. Anti-IL23 light chain protein sequence, SEQ ID NO: 137.

[0157] FIG. 101A-B are polypeptide sequences. A. Anti-IL23 heavy chain+BTLA ECD fusion protein sequence, SEQ ID NO: 138. B. Anti-IL23 light chain protein sequence, SEQ ID NO: 139.

[0158] FIG. 102A-B are polypeptide sequences. A. Anti-IL23 heavy chain+CD226 ECD fusion protein sequence, SEQ ID NO: 140. B. Anti-IL23 light chain protein sequence, SEQ ID NO: 141.

[0159] FIG. 103A-B are polypeptide sequences. A. Anti-IL23 heavy chain+LIGHT ECD fusion protein sequence, SEQ ID NO: 142. B. Anti-IL23 light chain protein sequence, SEQ ID NO: 143.

[0160] FIG. 104A-B are polypeptide sequences. TIM3 ecd—Fc—TGFβRII ecd fusion protein sequence, SEQ ID NO: 190. B. TIM3 ecd—Fc—TGFβRII ecd fusion protein sequence, SEQ ID NO: 191.

[0161] FIG. 105A-B are polypeptide sequences. A. Anti-PD-L1 heavy chain+TIM3 ECD fusion protein sequence, SEQ ID NO: 192. B. Anti-PD-L1 Light chain protein sequence, SEQ ID NO: 193.

[0162] FIG. 106A-D are polypeptide sequences. A. Ligand-binding sequence of PD-1 ecd protein sequence, SEQ ID NO: 194. B. TIM3 ecd+PD-1 ecd fusion protein sequence, SEQ ID NO: 195. C TIM3 ecd+PD-1 ecd fusion protein sequence, SEQ ID NO: 196. D. TIM3 ecd+PD-1 ecd fusion protein sequence, SEQ ID NO: 197.

[0163] FIG. 107 is PD-1 Extracellular domain protein sequence, SEQ ID NO: 198.

[0164] FIG. 108 is IgG Fc protein sequence, SEQ ID NO: 199.

[0165] FIG. 109 is TIM-3 Extracellular domain protein sequence, SEQ ID NO: 200.

[0166] FIGS. 110A-B are polypeptide sequences. A. SEQ ID NO: 201: Anti-CTLA4 Antibody (Ipilimumab) heavy chain+TGFbRII ECD. B. SEQ ID NO: 202: Anti-CTLA4 Antibody (Ipilimumab) light chain+PD-1 ECD.

[0167] FIGS. 111A-B are polypeptide sequences. A. SEQ ID NO: 203: Anti-CTLA4 Antibody (Ipilimumab) heavy chain+TGFbRII ECD. B. SEQ ID NO: 204: Anti-CTLA4 Antibody (Ipilimumab) light chain+TIM3 ECD.

[0168] FIGS. 112A-B are polypeptide sequences. A. SEQ ID NO: 205: Anti-CTLA4 Antibody (Ipilimumab) heavy chain+PD-1 ECD. B. SEQ ID NO: 206: Anti-CTLA4 Antibody (Ipilimumab) light chain+TIM3 ECD.

[0169] FIGS. 113A-B are polypeptide sequences. A. SEQ ID NO: 207: Anti-CTLA4 Antibody (Ipilimumab) heavy chain+TIM3 ECD. B. SEQ ID NO: 208: Anti-CTLA4 Antibody (Ipilimumab) light chain+PD-1 ECD.

[0170] FIGS. 114A-B are polypeptide sequences. A. SEQ ID NO: 209: Anti-CTLA4 Antibody (Ipilimumab) heavy chain. B. SEQ ID NO: 210: Anti-CTLA4 Antibody (Ipilimumab) light chain+PD-1 ECD.

[0171] FIGS. 115A-B are polypeptide sequences. A. SEQ ID NO: 211: Anti-CTLA4 Antibody (Ipilimumab) heavy chain. B. SEQ ID NO: 212: Anti-CTLA4 Antibody (Ipilimumab) light chain+TIM3 ECD.

[0172] FIGS. 116A-B are polypeptide sequences. A. SEQ ID NO: 213: Anti-IL6R Antibody (Tocilizumab) heavy chain+TGFbRII ECD. B. SEQ ID NO: 214: Anti-IL6R Antibody (Tocilizumab) light chain+PD-1 ECD.

[0173] FIGS. 117A-B are polypeptide sequences. A. SEQ ID NO: 215: Anti-IL6R Antibody (Tocilizumab) heavy chain+TGFbRII ECD. B. SEQ ID NO: 216: Anti-IL6R Antibody (Tocilizumab) light chain+TIM3 ECD.

[0174] FIGS. 118A-B are polypeptide sequences. A. SEQ ID NO: 217: Anti-IL6R Antibody (Tocilizumab) heavy chain+PD-1 ECD.B. SEQ ID NO: 218: Anti-IL6R Antibody (Tocilizumab) light chain+TIM3 ECD.

[0175] FIGS. 119A-B are polypeptide sequences. A. SEQ ID NO: 219: Anti-IL6R Antibody (Tocilizumab) heavy chain+TIM3 ECD. B. SEQ ID NO: 220: Anti-IL6R Antibody (Tocilizumab) light chain+PD-1 ECD.

[0176] FIGS. 120A-B are polypeptide sequences. A. SEQ ID NO: 221: Anti-IL6R Antibody (Tocilizumab) heavy chain. B. SEQ ID NO: 222: Anti-IL6R Antibody (Tocilizumab) light chain+PD-1 ECD.

[0177] FIGS. 121A-B are polypeptide sequences. A. SEQ ID NO: 223: Anti-IL6R Antibody (Tocilizumab) heavy chain. B. SEQ ID NO: 224: Anti-IL6R Antibody (Tocilizumab) light chain+TIM3 ECD.

[0178] FIGS. 122A-B are polypeptide sequences. A. SEQ ID NO: 225: Anti-EGFR Antibody (Cetuximab) heavy chain+TGFbRII ECD. B. SEQ ID NO: 226: Anti-EGFR Antibody (Cetuximab) light chain+PD-1 ECD.

[0179] FIGS. 123A-B are polypeptide sequences. A. SEQ ID NO: 227: Anti-EGFR Antibody (Cetuximab) heavy chain+TGFbRII ECD. B. SEQ ID NO: 228: Anti-EGFR Antibody (Cetuximab) light chain+TIM3 ECD.

[0180] FIGS. 124A-B are polypeptide sequences. A. SEQ ID NO: 229: Anti-EGFR Antibody (Cetuximab) heavy chain+PD-1 ECD. B. SEQ ID NO: 230: Anti-EGFR Antibody (Cetuximab) light chain+TIM3 ECD.

[0181] FIGS. 125A-B are polypeptide sequences. A. SEQ ID NO: 231: Anti-EGFR Antibody (Cetuximab) heavy chain+TIM3 ECD. B. SEQ ID NO: 232: Anti-EGFR Antibody (Cetuximab) light chain+PD-1 ECD.

[0182] FIGS. 126A-B are polypeptide sequences. A. SEQ ID NO: 233: Anti-EGFR Antibody (Cetuximab) heavy chain. B. SEQ ID NO: 234: Anti-EGFR Antibody (Cetuximab) light chain+PD-1 ECD.

[0183] FIGS. 127A-B are polypeptide sequences. A. SEQ ID NO: 235: Anti-EGFR Antibody (Cetuximab) heavy chain. B. SEQ ID NO: 236: Anti-EGFR Antibody (Cetuximab) light chain+TIM3 ECD.

[0184] FIGS. 128A-B are polypeptide sequences. A. SEQ ID NO: 237: Anti-HER2 Antibody (Trastuzumab) heavy chain+TGFbRII ECD. B. SEQ ID NO: 238: Anti-HER2 Antibody (Trastuzumab) light chain+PD-1 ECD.

[0185] FIGS. 129A-B are polypeptide sequences. A. SEQ ID NO: 239: Anti-HER2 Antibody (Trastuzumab) heavy chain+TGFbRII ECD. B. SEQ ID NO: 240: Anti-HER2 Antibody (Trastuzumab) light chain+TIM3 ECD.

[0186] FIGS. 130A-B are polypeptide sequences. A. SEQ ID NO: 241: Anti-HER2 Antibody (Trastuzumab) heavy chain+PD-1 ECD. B. SEQ ID NO: 242: Anti-HER2 Antibody (Trastuzumab) light chain+TIM3 ECD.

[0187] FIGS. 131A-B are polypeptide sequences. A. SEQ ID NO: 243: Anti-HER2 Antibody (Trastuzumab) heavy chain+TIM3 ECD. B. SEQ ID NO: 244: Anti-HER2 Antibody (Trastuzumab) light chain+PD-1 ECD.

[0188] FIGS. 132A-B are polypeptide sequences. A. SEQ ID NO: 245: Anti-HER2 Antibody (Trastuzumab) heavy chain. B. SEQ ID NO: 246: Anti-HER2 Antibody (Trastuzumab) light chain+PD-1 ECD.

[0189] FIGS. 133A-B are polypeptide sequences. A. SEQ ID NO: 247: Anti-HER2 Antibody (Trastuzumab) heavy chain. B. SEQ ID NO: 248: Anti-HER2 Antibody (Trastuzumab) light chain+TIM3 ECD.

[0190] FIGS. 134A-B are polypeptide sequences. A. SEQ ID NO: 249: Anti-VEGF Antibody (Bevacizumab) heavy chain+TGFbRII ECD. B. SEQ ID NO: 250: Anti-VEGF Antibody (Bevacizumab) light chain+PD-1 ECD.

[0191] FIGS. 135A-B are polypeptide sequences. A. SEQ ID NO: 251: Anti-VEGF Antibody (Bevacizumab) heavy chain+TGFbRII ECD. B. SEQ ID NO: 252: Anti-VEGF Antibody (Bevacizumab) light chain+TIM3 ECD.

[0192] FIGS. 136A-B are polypeptide sequences. A. SEQ ID NO: 253: Anti-VEGF Antibody (Bevacizumab) heavy chain+PD-1 ECD. B. SEQ ID NO: 254: Anti-VEGF Antibody (Bevacizumab) light chain+TIM3 ECD.

[0193] FIGS. 137A-B are polypeptide sequences. A. SEQ ID NO: 255: Anti-VEGF Antibody (Bevacizumab) heavy chain+TIM3 ECD. B. SEQ ID NO: 256: Anti-VEGF Antibody (Bevacizumab) light chain+PD-1 ECD.

[0194] FIGS. 138A-B are polypeptide sequences. A. SEQ ID NO: 257: Anti-VEGF Antibody (Bevacizumab) heavy chain. B. SEQ ID NO: 258: Anti-VEGF Antibody (Bevacizumab) light chain+PD-1 ECD.

[0195] FIGS. 139A-B are polypeptide sequences. A. SEQ ID NO: 259: Anti-VEGF Antibody (Bevacizumab) heavy chain. B. SEQ ID NO: 260: Anti-VEGF Antibody (Bevacizumab) light chain+TIM3 ECD.

[0196] FIGS. 140A-B are polypeptide sequences. A. SEQ ID NO: 261: Anti-gp120 Antibody (B12) heavy chain+TGFbRII ECD. B. SEQ ID NO: 262: Anti-gp120 Antibody (B12) light chain+PD-1 ECD.

[0197] FIGS. 141A-B are polypeptide sequences. A. SEQ ID NO: 263: Anti-gp120 Antibody (B12) heavy chain+TGFbRII ECD. B. SEQ ID NO: 264: Anti-gp120 Antibody (B12) light chain+TIM3 ECD.

[0198] FIGS. 142A-B are polypeptide sequences. A. SEQ ID NO: 265: Anti-gp120 Antibody (B12) heavy chain+PD-1 ECD. B. SEQ ID NO: 266: Anti-gp120 Antibody (B12) light chain+TIM3 ECD.

[0199] FIGS. 143A-B are polypeptide sequences. A. SEQ ID NO: 267: Anti-gp120 Antibody (B12) heavy chain+TIM3 ECD. B. SEQ ID NO: 268: Anti-gp120 Antibody (B12) light chain+PD-1 ECD.

[0200] FIGS. 144A-B are polypeptide sequences. A. SEQ ID NO: 269: Anti-gp120 Antibody (B12) heavy chain. B. SEQ ID NO: 270: Anti-gp120 Antibody (B12) light chain+PD-1 ECD.

[0201] FIGS. 145A-B are polypeptide sequences. A. SEQ ID NO: 271: Anti-gp120 Antibody (B12) heavy chain. B. SEQ ID NO: 272: Anti-gp120 Antibody (B12) light chain+TIM3 ECD.

[0202] FIGS. 146A-B are polypeptide sequences. A. SEQ ID NO: 273: Anti-PD1 Antibody (Nivolumab) heavy chain+TGFbRII ECD. B. SEQ ID NO: 274: Anti-PD1 Antibody (Nivolumab) light chain+TIM3 ECD.

[0203] FIGS. 147A-B are polypeptide sequences. A. SEQ ID NO: 275: Anti-PD1 Antibody (Nivolumab) heavy chain. B. SEQ ID NO: 276: Anti-PD1 Antibody (Nivolumab) light chain+TIM3 ECD.

[0204] FIGS. 148A-B are polypeptide sequences. A. SEQ ID NO: 277: Anti-PD1 Antibody (Pembrolizumab) heavy chain+TGFbRII ECD. B. SEQ ID NO: 278: Anti-PD1 Antibody (Pembrolizumab) light chain+TIM3 ECD.

[0205] FIGS. 149A-B are polypeptide sequences. A. SEQ ID NO: 279: Anti-PD1 Antibody (Pembrolizumab) heavy chain. B. SEQ ID NO: 280: Anti-PD1 Antibody (Pembrolizumab) light chain+TIM3 ECD.

[0206] FIGS. 150A-B are polypeptide sequences. A. SEQ ID NO: 281: Anti-PDL1 Antibody (Atezolizumab) heavy chain+TGFbRII ECD. B. SEQ ID NO: 282: Anti-PDL1 Antibody (Atezolizumab) light chain+TIM3 ECD.

[0207] FIGS. 151A-B are polypeptide sequences. A. SEQ ID NO: 283: Anti-PDL1 Antibody (Atezolizumab) heavy chain. B. SEQ ID NO: 284: Anti-PDL1 Antibody (Atezolizumab) light chain+TIM3 ECD.

[0208] FIGS. 152A-B are polypeptide sequences. A. SEQ ID NO: 285: Anti-PDL1 Antibody (Avelumab) heavy chain+TGFbRII ECD. B. SEQ ID NO: 286: Anti-PDL1 Antibody (Avelumab) light chain+TIM3 ECD.

[0209] FIGS. 153A-B are polypeptide sequences. A. SEQ ID NO: 287: Anti-PDL1 Antibody (Avelumab) heavy chain. B. SEQ ID NO: 288: Anti-PDL1 Antibody (Avelumab) light chain+TIM3 ECD.

[0210] FIG. 154 is the polypeptide sequence of the extracellular domain of TIGIT, SEQ ID NO: 289.

[0211] FIGS. 155A-B are polypeptide sequences. A. SEQ ID NO: 290: Anti-PD1 Antibody (Nivolumab) heavy chain+TIGIT ECD. B. SEQ ID NO: 291: Anti-PD1 Antibody (Nivolumab) light chain.

[0212] FIGS. 156A-B are polypeptide sequences. A. SEQ ID NO: 292: Anti-PD1 Antibody (Pembrolizumab) heavy chain+TIGIT ECD. B. SEQ ID NO: 293: Anti-PD1 Antibody (Pembrolizumab) light chain.

[0213] FIGS. 157A-B are polypeptide sequences. A. SEQ ID NO: 294: Anti-PDL1 Antibody (Atezolizumab) heavy chain+TIGIT ECD. B. SEQ ID NO: 295: Anti-PDL1 Antibody (Atezolizumab) light chain.

[0214] FIGS. 158A-B are polypeptide sequences. A. SEQ ID NO: 296: Anti-PDL1 Antibody (Avelumab) heavy chain+TIGIT ECD. B. SEQ ID NO: 297: Anti-PDL1 Antibody (Avelumab) light chain.

[0215] FIGS. 159A-B are polypeptide sequences. A. SEQ ID NO: 298: Anti-CTLA4 Antibody (Ipilimumab) heavy chain+TIGIT ECD. B. SEQ ID NO: 299: Anti-CTLA4 Antibody (Ipilimumab) light chain.

[0216] FIG. 160 is the polypeptide sequence of the extracellular domain of CD160, SEQ ID NO: 300.

[0217] FIG. 161 is the polypeptide sequence of the extracellular domain of CD96, SEQ ID NO: 301.

[0218] FIG. 162 is the polypeptide sequence of the extracellular domain of LIGHT, SEQ ID NO: 302.

[0219] FIG. 163 is the polypeptide sequence of the extracellular domain of CD44, SEQ ID NO: 303.

[0220] FIG. 164 is the polypeptide sequence of a fragment of the extracellular domain of TIM-3, SEQ ID NO: 304.

[0221] FIG. 165 is the polypeptide sequence of a fragment of LIGHT, SEQ ID NO: 305.

[0222] FIG. 166 is the polypeptide sequence of a fragment of LIGHT, SEQ ID NO: 306.

[0223] FIG. 167 is the polypeptide sequence of the extracellular domain of LAIR1, SEQ ID NO: 307.

### DETAILED DESCRIPTION OF THE INVENTION

[0224] The invention describes multifunctional antibody-ligand traps that are designed to counteract immune tolerance or T cell dysfunction in cancers and infectious disorders. The molecules of the invention are designed to efficiently interrupt the multiple autocrine/paracrine signaling loops involving diverse immunoreceptor-ligand interactions that cause immune dysfunction in the tumor or pathogen immune microenvironment. By counteracting the induction/function of regulatory T cells, immune tolerance, and/or T cell exhaustion, the molecules and compositions of this invention can restore and augment effective antitumor immunity for treatment of neoplastic diseases/cancer, or pathogen-directed immune responses for prevention or treatment of infectious diseases. The ability of this novel class of multifunctional antibody-ligand traps to unleash potent antitumor immune responses offers a promising immunotherapeutic strategy for many types of advanced and treatment-refractory cancers.

[0225] Before the present compositions and methods are described, it is to be understood that this invention is not limited to particular compositions, methods, and experimental conditions described, as such compositions, methods, and conditions may vary. It is also to be understood that the terminology used herein is for purposes of describing particular embodiments only, and is not intended to be limiting, since the scope of the present invention will be limited only in the appended claims.

[0226] As used in this specification and the appended claims, the singular forms “a”, “an”, and “the” include plural references unless the context clearly dictates otherwise. Thus, for example, references to “the method” includes one or more methods, and/or steps of the type described herein which will become apparent to those persons skilled in the art upon reading this disclosure and so forth.

[0227] All publications, patents, and patent applications mentioned in this specification are herein incorporated by reference to the same extent as if each individual publication, patent, or patent application was specifically and individually indicated to be incorporated by reference.

[0228] Unless defined otherwise, all technical and scientific terms used herein have the same meaning as commonly understood by one of ordinary skill in the art to which this invention belongs. Although any methods and materials similar or equivalent to those described herein can be used in the practice or testing of the invention, it will be understood that modifications and variations are encompassed within the spirit and scope of the instant disclosure. The preferred methods and materials are now described.

[0229] Immune dysfunction in the tumor microenvironment—a hallmark of cancers

[0230] Genetic mutations accruing from the inherent genomic instability of tumor cells present neo-antigens that are recognized by the immune system. Cross-presentation of tumor antigens at the immune synapse between antigen-presenting dendritic cells and T lymphocytes can potentially activate an adaptive antitumor immune response that is mediated by CD4+ T helper cells (TH1) and CD8+ cytotoxic effector cells, and sustained by tumor-reactive central memory T cells. However, tumors continuously evolve to counteract and ultimately defeat such immune surveillance by co-opting and amplifying mechanisms of immune tolerance to evade elimination by the immune system. This prerequisite for tumor progression is enabled by the ability of cancers to produce immunomodulatory factors that create a dysfunctional tumor immune microenvironment. These factors include immunomodulatory ligands, cytokines, and chemokines that regulate the differentiation, activation, proliferation, survival, cytotoxic function, and recruitment of immune cells, such as T cells, NK cells, macrophages, and dendritic cells. The independent and cooperative actions of these factors in the tumor microenvironment results in a dysfunctional immunophenotype characterized by abnormal differentiation and function of tumor-infiltrating T cells: (i) Reduction in TH1 cells; (ii) Elevation of regulatory T cells (Tregs), a sub-population of CD4+ T cells that suppress effector T cells and mediate immune tolerance; (iii) Reduction in cytotoxic CD8+ T cells; (iv) Elevation of exhausted T cells which fail to proliferate and exert effector functions such as cytotoxicity and cytokine secretion in response to antigen stimulation. The functional orientation of tumor-infiltrating immune cells has a major impact on the outcome of patients with cancer. Whereas TH1 cells and cytotoxic CD8+ T cells are uniformly and strongly associated with a longer disease-free survival, the infiltration of tumors with Tregs and exhausted CD8+ T cells has been correlated with a poor prognosis.

[0231] Molecular determinants of immune dysfunction in the tumor microenvironment

[0232] Cancers express immunosuppressive ligands that engage T cell inhibitory receptors (TCIR) and inhibit activation of T cells. These TCIR-TCIR ligand interactions serve as ‘immune checkpoints’ which counteract and restrain the activation of T cells by costimulatory receptors and ligands (FIG. 1). The following TCIR and TCIR ligands mediate immune tolerance and T cell exhaustion in the tumor microenvironment:

[0233] Programmed death 1 (PD-1)/PD-1 ligands and cytotoxic T lymphocyte antigen-4 (CTLA-4):

[0234] The PD-1 receptor (CD279) and its ligands, PD-1 ligand 1 (PD-L1; B7-H1; CD274) and PD-1 ligand 2 (PD-L2; B7-DC; CD273) are members of the B7-CD28 family that play a key role in the maintenance of self-tolerance. Engagement of PD-1 by PD-1 ligand inhibits CD3/CD28-mediated activation of T cells, inhibits T cell effector function, induces T cell exhaustion, and promotes T cell apoptosis PD-1/PD-L1 signaling promotes the induction, function, and maintenance of regulatory T cells (Tregs), a sub-population of immunosuppressive CD4⁺ T cells that express the forkhead box P3 (FOXP3) transcription factor and cytotoxic T lymphocyte antigen-4 (CTLA-4), an co-inhibitory molecule that restrains activation of T cells.

[0235] The PD-1/PD-L1 pathway plays a key role in inducing immune tolerance and T cell exhaustion in cancer. PD-L1 is expressed at high levels in several different cancers and high expression of PD-L1 on tumors is strongly associated with poor prognosis.=Tumor cell expression of PD-L1 is upregulated by signaling pathways (RAS-MEK-ERK, PI3K/AKT and JAK/STAT) that are activated by intrinsic genetic aberrations (such as EGFR activation or overexpression, activating RAS mutation, amplification/mutation of PIK3CA, or loss of PTEN), or cytokines in the tumor microenvironment (such as Interferon, IL-6, TGFβ). PD-1 expressing tumor-infiltrating CD8+ T cells exhibit a dysfunctional exhausted phenotype in many cancers, and antibody-mediated blockade of PD-1/PD-L1 signaling has been shown to improve clinical outcome and restore functional T cell responses in several cancers.

[0236] TIM-3 and CEACAM-1-mediated immune tolerance and T cell exhaustion:

[0237] The T cell immunoglobulin and mucin-domain containing-3 (TIM-3) and CEACAM-1 (Carcinoembryonic antigen related cell adhesion molecule-1) co-inhibitory receptors are key determinants of immune tolerance and T cell exhaustion. TIM-3 is a type I trans-membrane protein expressed on many immune cell types, such as IFN-γ-producing CD4+ and CD8+ T cells, and plays a key role in regulating innate and adaptive immune responses. TIM-3 expression is induced by cytokines involved in effector T cell differentiation, and requires T-bet, the signature transcription factor of the TH1 phenotype. Chronically stimulated T cells and terminally differentiated effector TH1 cells exhibit stabilized, high-level expression of TIM-3. TIM-3 inhibits expression of IFN-γ, suppresses TH1 cells, and induces progressive loss of T cell function (T cell exhaustion). In addition to its key role in regulating T cell effector function, TIM-3 is expressed on FOXP3+ Tregs and enhances the suppressive function of FOXP3+ Tregs. TIM-3 is highly upregulated on both CD4+ and CD8+ tumor infiltrating lymphocytes (TILs), and elevated TIM-3 expression on T cells is associated with immune dysfunction, tumor progression, and poor prognosis in many human cancers. TIM-3 expression on CD8+ TILs is closely associated with that of PD-1, and TIM-3+ PD-1+ CD8+ T cells represent the most dysfunctional “deeply” exhausted T cell population. The increased frequency of PD-1+ and TIM-3+ CD8+ TILs in cancers is inversely correlated with response to therapy and clinical outcome. TIM-3 expression is also significantly upregulated on tumor-infiltrating Tregs, and a predominant TIM-3+ FoxP3+ Treg population in TILs is a common feature across multiple forms of cancer that correlates with poor clinico-pathological parameters, such as nodal metastases and advanced stage.

[0238] The immunosuppressive function of TIM-3 requires its heterodimeric interaction with CEACAM-1, another type 1 transmembrane protein that is co-expressed with TIM-3 on activated T cells to downregulate T cell activity and function. The extracellular N-terminal immunoglobulin (IgV) domains of TIM-3 and CEACAM-1 share structural similarities and interact in via a shared signature “cleft” structure along their FG-CC′ interface. Heterophilic engagement with CEACAM1 facilitates the maturation and localization of TIM-3 to the T cell surface, and is instrumental for TIM-3-mediated induction of peripheral tolerance and suppression of antitumor immunity. Besides the heterophilic cis interaction described above, CEACAM1 can also ligate TIM-3 in trans suggesting that CEACAM1-expressing tumor cells may provide an inhibitory signal via TIM-3 on a T cell. The TIM-3 cytoplasmic tail is devoid of the classical immunoreceptor tyrosine-based inhibitory motifs (ITIMs) found in other inhibitory receptors, but contains conserved tyrosine residues (Tyr 265, 272) that are critical for binding SH2 domain-containing kinases of the T cell receptor (TCR) signaling pathway and HLA-B associated transcript 3 (Bat3). The interaction of CEACAM-1 with TIM-3 induces Y256/Y263 phosphorylation-mediated release of Bat3 and loss of Bat3-mediated TCR signaling, thereby enabling TIM-3 to cooperate with other binding partners to inhibit TCR signaling and induce T cell exhaustion. In addition to its ability to promote immunosuppression via its heterophilic interaction with TIM-3 (CEACAM1/Tim-3), CEACAM-1 can also suppress T cell activity via homodimerization of its extracellular domains in cis or trans (CEACAM1/CEACAM1). This homophilic interaction is required for phosphorylation of CEACAM-1 cytoplasmic domain ITIMs and recruitment of the SHP-1/SHP-2 tyrosine phosphatases which effect broad proximal suppression of TCR/CD3 complex signaling and inhibit a variety of effector functions, including T cell proliferation, TH1 cytokine production and cytotoxicity associated with T cell activation. These mechanistic insights indicate that the TIM-3/CEACAM1 axis exerts multipronged suppression of T cells via: (i) heterophilic TIM-3/CEACAM-1 interactions (cis CEACAM-1/TIM-3 heterodimerization; trans CEACAM1 heterodimerization with TIM-3); (ii) homophilic CEACAM-1/CEACAM-1 interactions (cis CEACAM-1 dimerization; trans CEACAM1-induced cis CEACAM-1 dimerization). Accordingly, tumor-infiltrating CD8+ T lymphocytes co-expressing TIM-3 and CEACAM1 exhibit the most exhausted phenotype in cancer, and elevated expression of CEACAM1 in several human cancers is correlated with metastasis and poor prognosis.

[0239] V-domain Ig Suppressor of T Cell Activation (VISTA)

[0240] V-domain Ig suppressor of T cell activation (VISTA) is an immune checkpoint molecule homologous to PD-L1 and PD-1 that is highly expressed on myeloid cells which causes suppression of T cell activation. VISTA is highly expressed on myeloid and granulocytic cells, and weakly on T cells. VISTA suppresses the activity of CD8+ and CD4+ T cells. VISTA-mediated T cell inhibition is long-lasting, even in the absence of VISTA (Lines et al., 2014). VISTA can act as a ligand, binding a receptor on T cells to inhibit proliferation and cytokine production. VISTA can also act as a receptor on T cells, where its ligation similarly induces inhibition of proliferation and cytokine production. VISTA additionally promotes Treg induction, and is highly expressed on tumor-infiltrating Tregs. VISTA and PD-1 non-redundantly suppress T cell activation.

[0241] Lymphocyte-Activated Gene-3 (LAG-3)

[0242] Lymphocyte-Activated Gene-3 (LAG-3; also called CD223) is a negative checkpoint regulator expressed on activated CD4+ T cells, CD8+ T cells, Treg cells, Tr1 cells, and subsets of NK cells, B cells, and DCs. LAG-3 is structurally homologous to CD4, and similarly binds MHC class II molecules. LAG-3 expression on T cells directly inhibits T cell activation. In addition to binding MHC class II, LAG-3 also interacts with LSECtin and Galectin-3 (Gal-3), both of which are expressed in the tumor microenvironment. LAG-3 ligation by either LSECtin or Galectin-3 leads to a decrease in effector T cell IFNγ production and an increase in Treg IL-10 production. LAG-3 is co-expressed and synergizes with PD-1 and TIM-3 to induce and maintain an exhausted T cell phenotype.

[0243] B and T Lymphocyte Attenuator (BTLA)

[0244] B and T lymphocyte attenuator (BTLA) is a negative checkpoint regulator with structural homology to CTLA-4 and PD-1. BTLA is expressed on T cells, mature DCs, macrophages, and most highly on B cells. BTLA binds to herpesvirus entry mediator (HVEM), which is expressed on T cells, B cells, NK cells, DCs, and myeloid cells. HVEM also interacts with CD160 (a negative checkpoint regulator expressed on T cells) and LIGHT (a costimulatory receptor). BTLA signaling on T cells, either through HVEM ligation or the administration of an α-BTLA agonist antibody, inhibits T cell proliferation. BTLA expression also restricts the expansion and activation of γδ T cells, via negative regulation of IL-17 and TNFα. BTLA is also capable of acting as a ligand, binding to HVEM expressed by T cells and promoting T cell survival. BTLA is co-expressed with PD-1 on CD8+ TILs, and appears to engage in synergistic and non-redundant immunosuppressive mechanisms.

[0245] T cell Ig and ITIM Domain (TIGIT)

[0246] T cell Ig and ITIM Domain (TIGIT) is an immune checkpoint molecule expressed on CD8+ T cells, CD4+ T cells, and NK cells. TIGIT has been shown to specifically bind Poliovirus Receptor (PVR; also called NECL5/CD155) and PVR-like protein PVRL2 (also called CD112). CD226 provides a positive co-stimulatory signal when it binds CD155/CD112, while TIGIT delivers an inhibitory signal. TIGIT is a higher-affinity binder for CD155 than it is for CD112. TIGIT forms a heterotetrameric complex with CD155, in which a core TIGIT homodimer binds a pair of CD155 molecules. CD226 on Th1/Th17 T helper cells provide positive co-stimulation when it binds CD155/CD112 on T cells. TIGIT also binds CD155/CD112 (and delivers a negative signal), and thus directly competes with CD226 for binding to CD155/CD112. In addition, TIGIT has been shown to directly bind to CD226 and interrupt its homodimerization, though it is not clear if this mechanism is operative in vivo. TIGIT binds CD155 on DCs to induce a tolerogenic phenotype. CD155 is highly expressed on DCs, and the TIGIT/CD155 interaction in the context leads to the development of tolerogenic DCs which induces IL-10 production, suppresses T-cell proliferation, and limits IFN-γ production. (Yu et al., 2009). CD155 and CD112 are highly expressed by tumor cells, which suggests alternative mechanisms for TIGIT-mediated immunosuppression, via direct effects on T cells. Indeed, TIGIT is uniquely enriched on tumor-infilitrating lymphocytes (TILs), and its function on FOXP3+ Tregs constitutes its most potent immunosuppressive capability.

[0247] TIGIT ligation additionally directly suppresses effector T cell function. TIGIT is found to be co-expressed with PD-1, TIM-3, and LAG-3 on CD8+ TILs. TIGIT has been shown to synergize with PD-1/PD-L1 and TIM-3 to impair anti-tumor immunity (Kurtulus et al., 2013). TIGIT ligation is capable of directly suppressing T cell proliferation and cytokine production on T and NK cells on which it is expressed. TIGIT+CD8+ TILs are deficient in several effector functions (e.g., IL-2 and TNF-α production), and contribute to immunosuppression via enhanced IL-10 production. Amongst CD4+ TILs, TIGIT is almost exclusively expressed on a subset of FOXP3+ Tregs with high expression of Treg effector molecules. TIGIT+ Tregs appear to selectively suppress Th1 and Th17 responses, but not Th2 responses. TIGIT+ Tregs are associated with higher gene expression of Tgfb1, Foxp3, Havcr2, Lag3, and Ctla4. Furthermore, genes for Cc14, Cxcr3, Ccr8, and Tbx21 are found downstream of TIGIT signaling in Tregs. This suggests an important causal role for TIGIT signaling in Treg migration and retention (Cc14, Cxcr3, Ccr8) and stability (Tbx21; also called T-bet).

[0248] CCR4

[0249] CCR4 is a chemokine receptor highly expressed on Tregs, which allows Tregs to be recruited to the tumor environment via CCL22 ligation. CCL22 is highly expressed by tumor cells to induce immunosuppression via Treg recruitment.

[0250] LAIR1

[0251] LAIR1 is a transmembrane glycoprotein with an immunoglobulin-like domain and a cytoplasmic tail containing two immune receptor tyrosine-based inhibitory motifs. When activated, LAIR1 recruits SHP-1 and SHP-2 phosphatases, and can strongly inhibit NK cell-mediated cytotoxicity via cross-linking of the LAIR1 antigen on natural killer (NK) cells.

[0252] Transforming Growth Factor-β (TGFβ)

[0253] Transforming growth factor-β (TGFβ) is a multifunctional cytokine that is overexpressed in a majority of cancers. The high-affinity binding of TGFβ to TGFβ receptor II (TGFβRII) recruits TGFβ receptor I into a heterotetrameric complex that phosphorylates SMAD2/3 and enables its interaction with SMAD4, leading to activation or repression of genes that control cell growth, differentiation, and migration. Tumor cells frequently become refractory to the growth-inhibitory effect of TGFβ and instead leverage its activity in the tumor microenvironment to facilitate immune tolerance and tumor progression. TGFβ plays a critical role in regulating the innate and adaptive immune system. TGF-β inhibits the activation and cytotoxic function of immune effector cells that mediate antibody dependent cellular cytotoxicity (ADCC). Autocrine/paracrine TGFβ-signaling in the localized microenvironment of tumor-infiltrating T cells attenuates the activity of CD8+ T cells, limits development of central memory cells, and skews the differentiation of CD4+ T helper cells (TH1) towards immunosuppressive regulatory T cells (Tregs) which facilitate tumor progression. TGFβ induces the expression of FOXP3, the signature transcription factor that determines and maintains the functional program of the Treg lineage. FOXP3, in turn, induces the expression of cytotoxic T lymphocyte antigen-4 (CTLA-4), an immune-inhibitory receptor that restrains co-stimulation of T cells, and Galectin-9 (GAL-9), a ligand that engages the T-cell immunoglobulin domain and mucin domain-3 (TIM-3) immune-inhibitory receptor and triggers exhaustion or apoptosis of effector T cells. GAL-9 further interacts with TGFβ receptors to drive FOXP3 expression in a positive-feed forward autocrine loop involving SMAD3 activation to induce and maintain Tregs. As such, the TGFβ-enriched tumor microenvironment promotes the development of Tregs that attenuate the activation of immune effectors. This ability of TGFβ to skew the differentiation of CD4+ T cells away from a TH1 phenotype toward a Treg lineage has significant clinical implications, since the functional orientation of tumor-infiltrating immune cells has a major impact on the outcome of patients with cancer. Whereas TH1 cells, cytotoxic CD8+ T cells, and central memory T cells are uniformly and strongly associated with a longer disease-free survival, the infiltration of tumors with Tregs has been correlated with a poor prognosis. Estimation of the relative abundance of T cell subtypes in TCGA-HNSCC dataset [utilizing T cell-type-specific reference gene expression profiles (RGEPs) from single-cell RNA sequencing] showed that the vast majority of cancers demonstrate dysfunctional immuno-inhibitory phenotypes characterized by abnormal skewing of CD4+ T cell differentiation away from TH1 cells toward Tregs and an increase in exhausted CD8+ T cells. The analysis of TCGA datasets showed that elevated TGFβ1/3 is strongly correlated with FOXP3 mRNA expression, and significantly associated with lower survival.

[0254] Limitations of Current Immunotherapy of Cancer:

[0255] Current clinical efforts to counteract tumor-induced immune tolerance are focused on monoclonal antibodies which target T cell inhibitory receptors or ligands that function as immune checkpoints, such as CTLA-4, PD-1, and PD-L1. One CTLA-4 antibody (ipilimumab), two PD-1 antagonists (Pembrolizumab, Nivolumab), and three PD-L1 inhibitors (Atezolizumab, Avelumab, Durvalumab) are currently approved in specific clinical indications for immunotherapy of cancers, such as melanoma, non-small cell lung cancer, head and neck cancer, or bladder cancer. Although a subset of patients with advanced cancers experience durable remissions and prolonged survival in response to CTLA-4, PD-1 or PD-L1 mAbs, the majority of patients do not respond to such therapy. Such tumors might use other immunomodulatory ligands or cytokines for inducing T cell dysfunction and inhibiting anti-tumor immunity. Because targeting the PD-1-PD-L pathway alone does not result in complete restoration of T cell function, and in some cancers targeting the PD-1-PD-L pathway does not restore T cell function at all, there is a need to identify and simultaneously counteract multiple molecules and inhibitory pathways that act in concert to execute immune tolerance and T cell exhaustion in the tumor microenvironment. Current immunotherapeutic strategies are limited by the following challenges posed by the dysfunctional immunophenotype of cancers:

[0256] (1) Multiple independent, cooperative, and redundant immunoreceptor-ligand interactions of immune tolerance and T cell exhaustion, each reinforced by feedback loops. Targeting individual molecular determinants are not sufficient to counteract multipronged mechanisms of immune dysfunction in cancers.

[0257] (2) The immuno-inhibitory signaling pathways which promote Tregs and induce T cell exhaustion involve autocrine and paracrine immunoreceptor-ligand interactions in cis and trans in the tumor microenvironment. Hyperactive immunosuppressive autocrine/paracrine ligand-receptor interactions in the tumor immune cell microenvironment are not effectively interrupted by current mAbs. Novel strategies are required to effectively compete with and physically disrupt such autocrine/paracrine signaling loops in the immediate microenvironment of the target tumor cell or tumor-infitrating T cell.

[0258] (3) De novo and adaptive mechanisms of tolerance: Besides exhibiting de novo mechanisms of immune dysfunction, tumors evolve to acquire additional mechanisms of immune tolerance over the course of treatment. As such, addressing one mechanism of might lead to the tumor exploiting an orthogonal pathway that achieves the equivalent immunosuppressive effect.

[0259] (4) The dysfunctional immunophenotype of cancers is characterized by skewed differentiation of CD4 cells away from TH1 phenotype toward a Treg or TH17 lineage in the tumor immune microenvironment. Antibodies that inhibit immune checkpoints (such as PD-1/PD-L1 or CTLA-4) or activate co-stimulatory receptors (such as 4-1BB or OX40) are focused on modulating the immune synapse to co-stimulate T cells, but fail to counteract the proximal ligands that divert CD4 cell differentiation from TH1 cells toward a Treg or TH17 lineage that promote immune tolerance and tumor-promoting inflammation.

[0260] Targeted Multifunctional Immunomodulatory Antibody-Ligand Traps

[0261] The invention describes targeted multifunctional immunomodulatory antibody-ligand traps that target a tumor cell or a tumor-infiltrating T cell and simultaneously sequester key ligands that contribute to immune dysfunction in the tumor microenvironment. Antibody-ligand traps comprise an antibody targeting a tumor cell or T cell immunoreceptor/ligand (targeting moiety) fused with a receptor extracellular domain (ECD) that simultaneously traps and disables one or more immunosuppressive ligand(s) in the immediate microenvironment of the targeted cell (Receptor ECD; ligand trap). The targeting moiety of the antibody-ligand trap exhibits its own specific function and simultaneously localizes the fused receptor ECD (trap) to the target tumor or immune cell microenvironment to effectively compete with the native receptor for ligands. The receptor ECD comprises a ligand-binding sequence of any immunomodulatory receptor that regulates the differentiation, proliferation, maintenance, survival, activity, function or recruitment of any immune cell, such as a T lymphocyte, myeloid cell, NK cell, or dendritic cell/antigen-presenting cell (DC/APC).

[0262] The targeting moiety of the invention comprises a polypeptide which specifically binds a component of a tumor cell, tumor microenvironment, tumor associated growth factor or receptor, tumor associated cytokine or receptor, tumor associated T lymphocyte, T cell co-stimulatory or inhibitory molecule, immune cell, pathogen, or pathogen-associated cell. In specific embodiments, the targeting moiety specifically binds an immunoreceptor, wherein said immunoreceptor is Cytotoxic T lymphocyte associated antigen-4 (CTLA-4, CD152), Programmed Death-1 (PD-1), Programmed death ligand (PD-L1), TIM-3, VISTA, B and T lymphocyte attenuator (BTLA), CD160, TIGIT, CD96, Lymphocyte activation gene-3 (LAG-3), B7-H3, CD39, CD73, adenosine A2a receptor, 4-1BB (CD137), OX-40 (CD134), GITR, CD27, HVEM, CD40L, CD40, CD47, CCR4, CCR5, CXCR4, Interleukin-12 receptor (IL-12R), Toll-like receptor (TLR1-10), CD4, CD25, CD3, ICOS, Killer cell immunoglobulin-like receptor (KIR), or T cell receptor (TCR).

[0263] The receptor ECD that is fused to the targeting moiety comprises the extracellular ligand-binding sequence of a T lymphocyte immunoreceptor, B lymphocyte receptor, DC receptor, NK cell receptor, cytokine receptor, growth factor receptor, chemokine receptor, or tumor cell receptor. In specific embodiments, the targeting moiety is fused to a ligand-binding sequence of one of the following the Receptor ECDs:

TABLE 1

| Receptor ECD | Cognate Ligands trapped by Receptor ECD |
|---|---|
| TGFβRII ecd | binds TGFβ |
| PD-1 ecd | binds PD-L1 and PD-L2 |
| TIM-3 ecd | binds CEACAM-1 |
| LIGHT ecd | binds HVEM |
| BTLA ecd | binds HVEM |
| CD226 ecd | binds CD155, CD112 |
| TIGIT ecd | binds CD155, CD112 |
| CD44 ecd | binds CD44 ligands |
| CSF1R ecd | binds CSF-1 |
| CCR4 ecd | binds CCL22 |
| KIR ecd | binds KIR ligands |
| VEGFR ecd | binds VEGF-A, VEGF-B, PIGF |
| RANK ecd | binds RANKL |
| VSIG8 ecd | binds VISTA |
| VISTA ecd | binds VSIG8 |
| LAIR1 ecd | Binds LAIR1 ligands |

[0264] The fused Receptor ECD sequence of the antibody-ligand trap optimally traps ligands in the target cell microenvironment:

[0265] a. Highly specific binding of all cognate ligands (and isoforms) that signal via the receptor with no risk of off-target effects

[0266] b. Predictable/reliable inhibition of all cognate ligands sequestered by the decoy receptor ECD; assured antagonist effects with no risk of paradoxical agonist function or redundant ligand-receptor interactions

[0267] c. Optimal avidity for the cognate ligands

[0268] d. Disrupts autocrine/paracrine signaling loops since the targeting moiety localizes the fused Receptor ECD to the target cell microenvironment, thereby enabling the decoy Receptor ECD to effectively compete with the native receptor for the targeted ligand(s).

[0269] e. Reduced risk of immunogenicity of natural receptor ECD

[0270] The Antibody-ligand traps of the invention can activate antitumor immunity by counteracting Tregs and adaptive T cell tolerance/exhaustion in the TME via multifunctional abilities:

[0271] a. Disable immune checkpoint receptor/ligand+counteract immunosuppressive ligand(s)

[0272] b. Activate a costimulatory receptor+counteract immunosuppressive ligand(s)/checkpoint

[0273] c. Target a tumor cell (e.g. GFR)+counteract immunosuppressive ligand(s)/checkpoint

[0274] d. Simultaneously counteract or limit the availability of multiple (T cell inhibitory receptor (TCIR) ligands or block multiple TCIRs/TCIR ligands.

[0275] The Antibody-ligand traps described in this invention can functionally block multiple TCIRs/TCIR ligands and serve as a strategy to broadly target T cell inhibitory pathways in the TME. Interfering with multiple tumor TCIR/TCIR ligand interactions and their autocrine/paracrine signaling in the tumor/immune cell microenvronment is more effective than multiple antibody-based immune checkpoint blockade. Their ability to cripple the broad multigenic resistance mechanisms of de novo and adaptive immune tolerance may address the challenges and limitations of combination immunotherapies. This is exemplified by antibody-ligand traps of this invention that simultaneously counteract PD-1/PD-L1 and TIM-3/CEACAM-1 mediated mechanisms of immune tolerance and T cell exhaustion in the tumor microenvironment.

[0276] Despite compelling antitumor activity of antibodies targeting the programmed death 1 (PD-1): programmed death ligand 1 (PD-L1) immune checkpoint, both de novo and adaptive resistance to these therapies is frequently observed. Targeting the PD-1/PD-L1 pathway may not be sufficient to break dysfunction in exhausted T cells, as complex cross-regulation exists between PD-1 and other checkpoint inhibitors to restrain anti-tumor T cell immunity, and in certain cases PD-1 blockade may be followed by development of adaptive resistance. The TIM-3/CEACAM1 axis is a key determinant of de novo and adaptive resistance to PD-1/PD-L1 therapy.

[0277] TIM-3/CEACAM1 exert multipronged suppression of T cells and NK cells via: (i) heterophilic TIM-3/CEACAM-1 interactions (cis CEACAM-1/TIM-3 heterodimerization; trans CEACAM1 heterodimerization with TIM-3); (ii) homophilic CEACAM-1/CEACAM-1 interactions (cis CEACAM-1 dimerization; trans CEACAM1-induced cis CEACAM-1 dimerization). Accordingly, tumor-infiltrating CD8⁺T lymphocytes co-expressing TIM-3 and CEACAM1 exhibit the most exhausted phenotype in both mouse models and patients with cancer.

[0278] Since PD-1, TIM-3, and CEACAM-1 entrain independent and cooperative mechanisms of immune tolerance and T cell exhaustion in the tumor microenvironment, simultaneous blockade of these checkpoints is required to unleash potent antitumor innate and adaptive antitumor immune responses. Besides elevated co-expression of all three T cell inhibitory receptors (TCIRs: PD-1, TIM-3, CEACAM-1) on tumor-infiltrating immune cells, tumor cells also co-express multiple ligands that engage these TCIRs to suppress tumor-reactive T cells (PD-L1, CEACAM-1, Galectin-9). This poses the therapeutic challenge of disrupting multiple autocrine/paracrine cis and trans TCIR/ligand interactions in the TME that act in concert to induce immune tolerance (PD-1/PD-L1; Tim-3/CEACAM-1; CEACAM-1/CEACAM-1). This therapeutic challenge has been addressed by inventing novel bifunctional antibody-ligand traps (Y-traps): (i) α-PDL1-TIM3ecd comprising an antibody targeting PD-L1 fused to a TIM-3 IgV ectodomain sequence; (ii) α-PD1-TIM3ecd comprising an antibody targeting PD-1 fused to a TIM-3 IgV ectodomain sequence.

[0279] Mechanism of Action for aPDL1-TIM3ecd and aPD1-TIM3ecd: aPDL1-TIM3ecd and aPD1-TIM3ecd bind PD-1 or PD-L1 on activated T cells and tumor cells, and simultaneously decorate them with a TIM-3ecd decoy which effectively competes with native cellular TIM-3 for binding the FG-CC′ cleft interface of CEACAM-1. As such these antibody-ligand traps not only disable PD-LI/PD-1 interactions, but simultaneously disrupt both cis and trans interactions involving Tim-3/CEACAM-1 as well as CEACAM-1/CEACAM-1 in the tumor microenvironment (TME). These studies demonstrate that α-PDL1-TIM3ecd and α-PD1-TIM3ecd are significantly more effective than either α-PDL1 (atezolizumab) or α-PD-1 (pembrolizumab), in promoting IFNγ expression and counteracting exhaustion of co-stimulated T cells in vitro. Most significantly, it was found that in vivo treatment of tumor-bearing humanized mice with these antibody-ligand traps results in a striking increase in the number of tumor-infiltrating CD4+ and CD8+ T cells, and is significantly more effective in inhibiting tumor progression compared to equivalent treatment with α-PDL1 (atezolizumab), α-PD-1 (pembrolizumab), α-Tim-3 antibody, or even a combination of α-PDL1 and α-Tim-3. These data demonstrate that heterophilic and homophilic Tim-3/CEACAM-1 interactions in the tumor microenvironment limit the antitumor efficacy of PD-1/PD-L1 inhibitors, and that α-PDL1-TIM3ecd and α-PD1-TIM3ecd provide a more effective immunotherapeutic strategy to counteract or reverse T cell exhaustion by simultaneously disabling the PD-1/PD-L1 checkpoint and counteracting both components of the Tim-3/CEACAM-1 axis.

[0280] In one embodiment, the present invention provides a molecule comprising a targeting moiety and an immunomodulatory moiety, wherein: the targeting moiety comprises a polypeptide which specifically binds a component of a tumor cell, tumor microenvironment, tumor associated growth factor or receptor, tumor associated cytokine or receptor, tumor associated T lymphocyte, T cell co-stimulatory or inhibitory molecule, immune cell, pathogen, or pathogen-associated cell, and the immunomodulatory moiety comprises the extracellular ligand-binding (ECD) sequence or ligand binding fragment thereof of a T lymphocyte immunoreceptor, B lymphocyte receptor, DC receptor, NK cell receptor, cytokine receptor, growth factor receptor, chemokine receptor, or tumor cell receptor.

[0281] As used herein, “targeting moiety” refers to a molecule that has the ability to localize and bind to a specific molecule or cellular component. The targeting moiety can be an antigen-binding domain of an immunoglobulin, antibody, bispecific or multispecific antibody, antibody fragment, scFv, Fc-containing polypeptide, polypeptide, peptide, or any combination thereof. In one embodiment, a targeting moiety can bind to a molecule present in a cell or tissue. In one aspect, the targeting moiety can bind a molecule in a diseased cell or tissue, such as a cancer cell or tumor. In, another aspect, the targeting molecule can bind a normal cell or tissue, such as an immune cell. In another aspect, the targeting moiety can bind a cellular or extracellular molecule that modulates the immune response. In another aspect, the targeting moiety binds a growth factor receptor, growth factor, cytokine receptor, cytokine, or cell surface molecule.

[0282] In another embodiment, the targeting moiety is a tumor-targeting moiety. The tumor-targeting moiety can bind a component of a tumor cell or bind in the vicinity of a tumor cell (e.g., tumor vasculature or tumor microenvironment). In one embodiment, the tumor targeting moiety binds to a component of a tumor cell, tumor microenvironment, tumor vasculature, tumor-associated lymphocyte, tumor antigen, tumor-associated antigen, tumor cell surface molecule, tumor antigenic determinant, tumor antigen-containing fusion protein, tumor-associated cell, tumor-associated immune cell, or tumor vaccine.

[0283] For example, in various embodiments, a targeting moiety is specific for or binds to a molecule or component, which includes but is not limited to, epidermal growth factor receptor (EGFR, EGFR1, ErbB-1, HER1), ErbB-2 (HER2/neu), ErbB-3/HER3, ErbB-4/HER4, EGFR ligand family; insulin-like growth factor receptor (IGFR) family, IGF-binding proteins (IGFBPs), IGFR ligand family (IGF-1R); platelet derived growth factor receptor (PDGFR) family, PDGFR ligand family; fibroblast growth factor receptor (FGFR) family, FGFR ligand family, vascular endothelial growth factor receptor (VEGFR) family, VEGF family; HGF receptor family: TRK receptor family; ephrin (EPH) receptor family; AXL receptor family; leukocyte tyrosine kinase (LTK) receptor family; TIE receptor family, angiopoietin 1, 2; receptor tyrosine kinase-like orphan receptor (ROR) receptor family; discoidin domain receptor (DDR) family; RET receptor family; KLG receptor family; RYK receptor family; MuSK receptor family; Transforming growth factor alpha (TGF-α), TGF-α receptor; Transforming growth factor-beta (TGF-β), TGF-β receptor; Interleukin 13 receptor alpha2 chain (IL13Ralpha2), Interleukin-6 (IL-6), 1L-6 receptor, Interleukin-4, IL-4 receptor, Cytokine receptors, Class I (hematopoietin family) and Class II (interferon/IL-10 family) receptors, tumor necrosis factor (TNF) family, TNF-α, tumor necrosis factor (TNF) receptor superfamily (TNTRSF), death receptor family, TRAIL-receptor; Chemokine family, Chemokine receptor family; cancer-testis (CT) antigens, lineage-specific antigens, differentiation antigens, alpha-actinin-4, ARTC1, breakpoint cluster region-Abelson (Bcr-abl) fusion products, B-RAF, caspase-5 (CASP-5), caspase-8 (CASP-8), beta-catenin (CTNNB1), cell division cycle 27 (CDC27), cyclin-dependent kinase 4 (CDK4), CDKN2A, COA-1, dek-can fusion protein, EFTUD-2, Elongation factor 2 (ELF2), Ets variant gene 6/acute myeloid leukemia 1 gene ETS (ETC6-AML1) fusion protein, fibronectin (FN), GPNMB, low density lipid receptor/GDP-L fucose: beta-Dgalactose 2-alpha-Lfucosyltraosferase (LDLR/FUT) fusion protein, HLA-A2, arginine to isoleucine exchange at residue 170 of the alpha-helix of the alpha2-domain in the HLA-A2 gene (HLA-A*201-R170I), MLA-A11, heat shock protein 70-2 mutated (HSP70-2M), KIAA0205, MART2, melanoma ubiquitous mutated 1,2, 3 (MUM-1, 2,3), prostatic acid phosphatase (PAP), neo-PAP, Myosin class 1, NFYC, OGT, OS-9, pml-RARalpha fusion protein, PRDX5, PTPRK, K-ras (KRAS2), N-ras (NRAS), HRAS, RBAF600, SIRT2, SNRPD1, SYT-SSX1 or -SSX2 fusion protein, Triosephosphate Isomerase, BAGE, BAGE-1, BAGE-2,3,4,5, GAGE-1,2,3,4,5,6,7,8, GnT-V (aberrant N-acetyl giucosaminyl transferase V, MGAT5), HERV-K-MEL, KK-LC, KM-HN-1, LAGE, LAGE-1, CTL-recognixed antigen on melanoma (CAMEL), MAGE-A1 (MAGE-1), MAGE-A2, MAGE-A3, MAGE-A4, MAGE-A5, MAGE-A6, MAGE-A8, MAGE-A9, MAGE-A10, MAGE-A11, MAGE-A12, MAGE-3, MAGE-B1, MAGE-B2, MAGE-B5, MAGE-B6, MAGE-C1, MAGE-C2, mucin 1 (MUC1), MART-1/Melan-A (MLANA), gp100, gp100/Pme117 (S1LV), tyrosinase (TYR), TRP-1, HAGE, NA-88, NY-ESO-1, NY-ESO-1/LAGE-2, SAGE, Sp17, SSX-1,2,3,4, TRP2-1NT2, carcino-embryonic antigen (CEA), Kallikfein 4, mammaglobm-A, OA1, prostate specific antigen (PSA), prostate specific membrane antigen, TRP-1/gp75, TRP-2, adipophilin, interferon inducible protein absent in nielanorna 2 (AIM-2), BING-4, CPSF, cyclin D1, epithelial cell adhesion molecule (Ep-CAM), EpbA3, fibroblast growth factor-5 (FGF-5), glycoprotein 250 (gp250intestinal carboxyl esterase (iCE), alpha-feto protein (AFP), M-CSF, mdm-2, MUCI, p53 (TP53), PBF, FRAME, PSMA, RAGE-1, RNF43, RU2AS, SOX10, STEAP1, survivin (BIRCS), human telomerase reverse transcriptase (hTERT), telomerase, Wilms' tumor gene (WT1), SYCP1, BRDT, SPANX, XAGE, ADAM2, PAGE-5, LIP1, CTAGE-1, CSAGE, MMA1, CAGE, BORIS, HOM-TES-85, AF15q14, HCA66I, LDHC, MORC, SGY-1, SPO11, TPX1, NY-SAR-35, FTHLI7, NXF2 TDRD1, TEX 15, FATE, TPTE, immunoglobulin idiotypes, Bence-Jones protein, estrogen receptors (ER), androgen receptors (AR), CD40, CD30, CD20, CD19, CD33, CD4, CD25, CD3, cancer antigen 72-4 (CA 72-4), cancer antigen 15-3 (CA 15-3), cancer antigen 27-29 (CA 27-29), cancer antigen 125 (CA 125), cancer antigen 19-9 (CA 19-9), beta-human chorionic gonadotropin, 1-2 microglobulin, squamous cell carcinoma antigen, neuron-specific enolase, heat shock protein gp96, GM2, sargramostim, CTLA-4, 707 alanine proline (707-AP), adenocarcinoma antigen recognized by T cells 4 (ART-4), carcinoembryogenic antigen peptide-1 (CAP-1), calcium-activated chloride channel-2 (CLCA2), cyclophilin B (Cyp-B), human signet ring tumor-2 (HST-2), Human papilloma virus (HPV) proteins (HPV-E6, HPV-E7, major or minor capsid antigens, others), Epstein-Barr vims (EBV) proteins (EBV latent membrane proteins-LMP1, LMP2; others), Hepatitis B or C virus proteins, and HIV proteins, including gp120. A composition of the invention can further include the foregoing as a peptide/polypeptide and/or encoding the same.

[0284] In one aspect, the targeting moiety polypeptide specifically binds Cytotoxic T lymphocyte associated antigen-4 (CTLA-4, CD152), Programmed Death-1 protein (PD-1), Programmed death ligand-1 (PD-L1), Programmed death ligand (PD-L2),B7-H3 (CD276),T-cell immunoglobulin and mucin-domain containing-3 (TIM-3), Carcinoembryonic antigen-related cell adhesion molecule 1 (CEACAM-1), Carcinoembryonic Antigen (CEA), V domain Ig suppressor of T cell activation (VISTA), V-set and immunoglobulin domain containing 8 (VSIG8), B and T lymphocyte attenuator (BTLA), Herpesvirus Entry Mediator (HVEM), CD160,T cell Ig and ITM domain (TIGIT), CD226, CD96, CD122, Lymphocyte activation gene-3 (LAG-3), transforming growth factor β (TGF-β), transforming growth factor β receptor (TGFβR), 4-1BB (CD137), Inducible T-Cell Costimulator (ICOS), OX-40 (CD134), glucocorticoid-induced TNFR-related protein (GITR), IL6R, IL23R, IL17R, IL-6, IL-23, IL-17, CD39, CD47, CD73, CCR4, CCR5, CXCR4,IL12R,CD4, CD25, CD3, Receptor activator of nuclear factor kappa-B ligand (RANKL), epidermal growth factor receptor (EGFR, EGFR1, ErbB-1, HER1), ErbB-2 (HER2/neu), ErbB-3/HER3, ErbB-4/HER4, Epidermal growth factor (EGF), Transforming growth factor α (TGFα), Vascular endothelial growth factor (VEGF), Vascular endothelial growth factor receptor-1 (VEGFR-1), VEGFR-2, VEGFR-3.

[0285] In one embodiment, the present invention provides a molecule including a targeting moiety fused with an “immunomodulatory moiety”. As used herein, “immunomodulatory moiety” refers to a polypeptide that comprises the extracellular domain (ECD) sequence or ligand binding fragment thereof of a T lymphocyte immunoreceptor, T cell inhibitory receptor (TCIR), T-cell co-inhibitory molecule, T cell co-stimulatory molecule, B lymphocyte receptor, DC receptor, NK cell receptor, cytokine receptor, growth factor receptor, chemokine receptor, or tumor cell receptor. In an additional aspect, the “immunomodulatory moiety” specifically binds a cytokine, cytokine receptor, co-stimulatory molecule, or co-inhibitory molecule that modulates the immune system. In one aspect, the immunomodulatory moiety is an agonist that increases the function of the bound molecule. In another aspect, the immunomodulatory moiety is an antagonist that inhibits the function of the targeted molecule.

[0286] In another aspect, the immunomodulatory moiety specifically comprises the extracellular domain or ligand binding fragment thereof of one of the following molecules: transforming growth factor β receptor II (TGFβRII), programmed death 1 protein (PD-1), T cell immunoglobulin and mucin domain containing 3 (TIM-3), B- and T-lymphocyte attenuator (BTLA), CD226, T cell Ig and ITM domain (TIGIT), CD44, CD96, CD160, Colony stimulating factor 1 receptor (CSF1R), CCR4, Killer-cell immunoglobulin-like receptor (KIR), Vascular endothelial growth factor receptor (VEGFR), Receptor Activator of Nuclear Factor η B (RANK), V-set and immunoglobulin domain containing 8 (VSIG8), LIGHT (TNFSF14), leukocyte associated immunoglobulin like receptor 1 (LAIR1), or V domain Ig suppressor of T cell activation (VISTA).

[0287] In another aspect, the immunomodulatory moiety is fused to the C-terminus of the targeting moiety. In another aspect, the immunomodulatory moiety is fused to the N-terminus of the targeting moiety. In one aspect, the fusion molecule is represented by X-Fc-Y, wherein X is the targeting moiety, Fc is an immunoglobulin Fc region, and Y is the immunomodulatory moiety. In another aspect, the fusion molecule is represented by Y-Fc-X, wherein X is the targeting moiety, and Y is the immunomodulatory moiety.

[0288] As used herein, the terms “extracellular domain” or “ECD” refers to that part of the receptor that protrudes from the outer membrane of the cell organelles and cells into the extracellular space. The polypeptide sequence of the ECD includes any analog or fragment of a polypeptide or peptide whose amino acid residue sequence is shown herein.

[0289] The term “analog” includes any polypeptide or peptide or having an amino acid residue sequence substantially identical to a sequence specifically shown herein in which one or more residues have been conservatively substituted with a functionally similar residue and which displays the activity as described herein. Examples of conservative substitutions include the substitution of one non-polar (hydrophobic) residue such as isoleucine, valine, leucine or methionine for another, the substitution of one polar (hydrophilic) residue for another such as between arginine and lysine, between glutamine and asparagine, between glycine and serine, the substitution of one basic residue such as lysine, arginine or histidine for another, or the substitution of one acidic residue, such as aspartic acid or glutamic acid for another.

[0290] The term “fragment” refers to any subject polypeptide having an amino acid residue sequence shorter than that of a polypeptide whose amino acid residue sequence is disclosed herein.

[0291] As used herein, the term “ligand binding fragment” refers to a portion or fragment of the ECD that binds a ligand. In a situation where “ligand binding fragment” is used to refer to a portion or fragment of a molecule that is itself considered to be a “ligand,” “ligand binding fragment” refers to a portion or fragment of the ECD of that molecule that binds its binding partner.

[0292] Antibodies: In one embodiment, the targeting moiety or fusion protein is an immunoglobulin. As used herein, the term “immunoglobulin” includes natural or artificial mono- or polyvalent antibodies including, but not limited to, polyclonal, monoclonal, multispecific, human, humanized or chimeric antibodies, single chain antibodies, Fab fragments. F(ab') fragments, fragments produced by a Fab expression library, anti-idiotypic (anti-Id) antibodies (including, e.g., anti-Id antibodies to antibodies of the invention), and epitope-binding fragments of any of the above. The term “antibody,” as used herein, refers to immunoglobulin molecules and immunologically active portions of immunoglobulin molecules, i.e., molecules that contain an antigen binding site that immunospecifically binds an antigen. The immunoglobulin can be of any type (e.g., IgG, IgE, IgM, IgD, IgA, and IgY), class (e.g., IgG1, IgG2, IgG3, IgG4, IgA1, and IgA2) or subclass of immunoglobulin molecule.

[0293] An antibody as disclosed herein includes an antibody fragment, such as, but not limited to, Fab, Fab′ and F(ab′)2, Fd, single-chain Fvs (scFv), single-chain antibodies, disulfide-linked Fvs (sdfv) and fragments including either a VL or VH domain. In one embodiment, the targeting moiety is an antibody or scFv.

[0294] An antigen-binding antibody fragment, including single-chain antibody, may include the variable region(s) alone or in combination with the entirety or a portion of the following: hinge region, CH1, CH2, and CH3 domains. An antigen-binding fragment can also include any combination of variable region(s) with a hinge region, CH1, CH2, and CH3 domains. Also includes is a Fc fragment, antigen-Fc fusion proteins, and Fc-targeting moiety. The antibody may be from any animal origin including birds and mammals. In one aspect, the antibody is, or derived from, a human, murine (e.g., mouse and rat), donkey, sheep, rabbit, goat, guinea pig, camel, horse, or chicken. Further, such antibody may be a humanized version of an antibody. The antibody may be monospecific, bispecific, trispecific, or of greater multispecificity.

[0295] The antibody herein specifically include a “chimeric” antibody in which a portion of the heavy and/or light chain is identical with or homologous to corresponding sequences in antibodies derived from a particular species or belonging to a particular antibody class or subclass, while the remainder of the chain(s) is identical with or homologous to corresponding sequences in antibodies derived from another species or belonging to another antibody class or subclass, as well as fragments of such antibodies, so long as they exhibit the desired biological activity (U.S. Pat. No. 4,816,567; and Morrison et al (1984) Proc. Natl. Acad. Sci. USA. 81:6851-6855). A chimeric antibody of interest herein includes “primatized” antibodies including variable domain antigen-binding sequences derived from a non-human primate (e.g., Old World Monkey, Ape etc) and human constant region sequences.

[0296] Various methods have been employed to produce antibodies. Hybridoma technology, which refers to a cloned cell line that produces a single type of antibody, uses the cells of various species, including mice (murine), hamsters, rats, and humans. Another method to prepare an antibody uses genetic engineering including recombinant DNA techniques. For example, antibodies made from these techniques include, among others, chimeric antibodies and humanized antibodies. A chimeric antibody combines DNA encoding regions from more than one type of species. For example, a chimeric antibody may derive the variable region from a mouse and the constant region from a human. A humanized antibody comes predominantly from a human, even though it contains nonhuman portions. Like a chimeric antibody, a humanized antibody may contain a completely human constant region. But unlike a chimeric antibody, the variable region may be partially derived from a human. The nonhuman, synthetic portions of a humanized antibody often come from CDRs in murine antibodies. In any event, these regions are crucial to allow the antibody to recognize and bind to a specific antigen.

[0297] In one embodiment, the molecules of this invention can be synthesisized using recombinant DNA methods well described in the art. The cDNA for the antibody heavy chain and the cDNA for the antibody light chain were gene synthesized and subsequently cloned into separate plasmids under the control of a mammalian promoter and polyadenylation signal. Plasmid DNA was amplified in E. coli and DNA purified using anion exchange kits for low endotoxin plasmid DNA preparation. DNA concentration was determined by measuring the absorption at a wavelength of 260 nm. Correctness of the sequences was verified with Sanger sequencing (with up to two sequencing reactions per plasmid depending on the size of the cDNA.) The plasmid DNAs for heavy and light chain were subsequently co-transfected into suspension-adapted CHO K1 cells (originally received from ATCC and adapted to serum-free growth in suspension culture at evitria). In one embodiment, a hybridoma can produce a targeted fusion protein comprising a targeting moiety and an immunomodulatory moiety.

[0298] In one embodiment, a targeting moiety comprising an antibody, antibody fragment, or polypeptide is linked or fused to an immunomodulatory moiety consisting of a polypeptide, with a linker or without a linker. The linker can be an amino acid linker. In one embodiment, a linker is (GGGGS)n (SEQ ID NO: 3) wherein n is 1,2,3,4,5,6,7, or 8. For example, GGGGSGGGGSGGGGS (SEQ ID NO: 4). In another embodiment, a linker is IEGRDM1D (SEQ ID NO: 5). In various aspects, the length of the linker may be modified to optimize binding of the target moiety or the function of the immunomodulatory moiety.

[0299] In various aspects, the immunomodulatory moiety is a polypeptide that is fused to the C-terminus of the Fc region of the heavy chain of a targeting antibody or Fc-containing fusion protein. In another aspect, the immunomodulatory moiety is a polypeptide that is fused to the C-terminus of the light chain of a targeting antibody. In another aspect, the fusion protein comprises an X-Fc-Y sequence, wherein X is a targeting polypeptide and Y is an immunomodulatory polypeptide.

[0300] An antibody fragment can include a portion of an intact, antibody, e.g. including the antigen-binding or variable region thereof. Examples of antibody fragments include Fab, Fab′, F(ab′)2, and Fv fragments; Fc fragments or Fc-fusion products; diabodies; linear antibodies; single-chain antibody molecules; and multispecific antibodies formed from antibody fragment(s).

[0301] An intact antibody is one which includes an antigen-binding variable region as well as a light chain constant domain (CL) and heavy chain constant domains, CH1, CH2 and CH3. The constant domains may be native sequence constant domains (e.g., human native sequence constant domains) or amino acid sequence variant thereof or any other modified Fc (e.g. glycosylation or other engineered Fc).

[0302] The intact antibody may have one or more “effector functions” which refer to those biological activities attributable to the Fc region (a native sequence Fc region or amino acid sequence variant Fc region or any other modified Fc region) of an antibody. Examples of antibody effector functions include Clq binding; complement dependent cytotoxicity; Fc receptor binding; antibody-dependent cell-mediated cytotoxicity (ADCC); phagocytosis; down regulation of cell surface receptors (e.g., B cell receptor (BCR); and cross-presentation of antigens by antigen presenting cells or dendritic cells. In one embodiment, the targeting antibody or Fc-containing fusion protein facilitates focused or preferential delivery of a immunomodulatory moiety to a target cell. In another aspect, a targeting antibody can induce death of the targeted cell or sensitize it to immune cell-mediated cytotoxicity. In another aspect, the Fc-fusion protein or antibody can facilitate delivery of the immunomodulatory moiety or immunogenic apoptotic material from antibody-bound tumor targets, or both, to an antigen presenting cells (APC) via interactions between their Fc and Fc receptors (on APC).

[0303] Depending on the amino acid sequence of the constant domain of their heavy chains, intact antibodies can be assigned to different “classes.” There are five major classes of intact antibodies: IgA, IgD, IgE, IgG, and IgM, and several of these may be further divided into “subclasses” (isotypes), e.g., IgG1, IgG2, IgC3, IgG4, IgA, and IgA2. The heavy-chain constant domains (hat correspond to the different classes of antibodies are called alpha (α), delta (δ), epsilon (ε), gamma (γ), and mu (μ) respectively. The subunit structures and three-dimensional configurations of different classes of immunoglobulins are well known.

[0304] In one aspect, the antibody specifically binds a T cell inhibitory receptor (TCIR), a T cell inhibitory receptor ligand (TCIR ligand), a T-cell co-inhibitory molecule, or a T cell co-stimulatory molecule.

[0305] T cell activation begins with the recognition of an antigenic peptide in the context of a major histocompatibility complex (MHC) on an antigen-presenting cell by the T cell receptor (TCR). The process of T cell activation is mediated by a number of signaling proteins through inducible phosphorylation, enzyme activation and protein-protein and protein-lipid interactions. T cells require two signals to become fully activated. A first signal, which is antigen-specific, is provided through the T cell receptor (TCR) which interacts with peptide-MHC molecules on the membrane of antigen presenting cells (APC). A second signal, the co-stimulatory signal, is antigen nonspecific and is provided by the interaction between co-stimulatory molecules expressed on the membrane of APC and the T cell. T cell co-stimulation is necessary for T cell proliferation, differentiation and survival. Activation of T cells without co-stimulation may lead to T cell anergy, T cell deletion or the development of immune tolerance.

[0306] The best characterized co-stimulatory molecules expressed by T cells is CD28 which interacts with CD80 (B7.1) and CD86 (B7.2) on the membrane of APC. Other costimulatory receptors expressed by T cells include 4-1BB (receptor for 4-1BB ligand), ICOS (Inducible Costimulator)(receptor for ICOS-L), OX40 (receptor for OX40 ligand), GITR (receptor for GITR ligand), CD27 (interacts with CD70), CD4OL/CD40, HVEM (interacts with LIGHT), CD226 (interacts with CD155).

[0307] The activation signals are modulated by a family of receptors termed, co-inhibitory receptors that include CTLA-4, PD-1, LAG-3, TIM-3, CEACAM-1, TIGIT, CD96, BTLA, CD160, VISTA, VSIG8, LAIR. Co-inhibitory receptors modulate signaling by utilizing mechanisms such as ectodomain competition with counter receptors and by the use of intracellular mediators such as protein phosphatases. Co-inhibitory receptors can act as threshold-setters, modulators, checkpoints and feedback mechanisms that can fine tune the quality and magnitude of the T cell immune response.

[0308] Receptors that are inhibitory to T cell function are termed T cell co-inhibitory receptors. Inhibitory receptors attenuate and counterbalance activation signals initiated by stimulatory receptors. The subsequent outcomes on T cell function can range from temporary inhibition to permanent inactivation and cell death. TCR signaling can be controlled by various mechanisms that differ in their time of action and/or target molecule. Negative regulatory mechanisms are in place to act before T cell activation to maintain its quiescent state.

[0309] The majority of T cell co-inhibitory receptors belong to the immunoglobulin (Ig) superfamily. One mechanism involves the sequestration of the ligands for co-stimulatory receptors, depriving the T cell from receiving activation signals necessary for complete activation. The second mechanism involves the recruitment of intracellular phosphatases by an immunoreceptor tyrosine-based inhibition motif (ITIM) and/or an immunoreceptor tyrosine-based switch motif (ITSM) that make up the cytoplasmic tail of certain inhibitory receptors, which dephosphorylate signaling molecules downstream of the TCR and co-stimulatory pathways, leading to a quantitative reduction in activation-induced gene expression. The third mechanism involves the upregulation (or downregulation) of genes that code for proteins involved in the inhibition of immune functions . A co-inhibitory receptor could use a combination of the above and possibly other yet to be discovered mechanisms to regulate T cell signaling.

[0310] Co-inhibitory receptors are transmembrane glycoproteins that transmit dominant negative signals mainly via intracellular phosphatases that bind to phosphorylated tyrosine residues in the cytoplasmic domain. Co-inhibitory receptors can act as safety mechanisms and threshold setters to prevent uncontrolled detrimental extremes of reactivity by counteracting the stimulatory signals.

[0311] Examples of antibodies or fragments thereof which may be incorporated into molecules, fusion proteins, compositions and methods disclosed herein include, but are not limited, to antibodies such as trastuzumab (anti-HER2/neu antibody); Pertuzumab (anti-HER2 mAb); cetuximab (chimeric monoclonal antibody to epidermal growth factor receptor EGFR); panitumumab (anti-EGFR antibody); nimotuzumab (anti-EGFR antibody); Zalutumumab (anti-EGFR mAb); Necitumumab (anti-EGFR mAb); MDX-210 (humanized anti-HER-2 bispecific antibody); MDX-210 (humanized anti-HER-2 bispecific antibody); MDX-447 (humanized anti-EGF receptor bispecific antibody); Rituximab (chimeric murine/human anti-CD20 mAb); Obinutuzumab (anti-CD20 mAb); Ofatumumab (anti-CD20 mAb); Tositumumab-I131 (anti-CD20 mAb); Ibritumomab tiuxetan (anti-CD20 mAb); Bevacizumab (anti-VEGF mAb); Ramucirumab (anti-VEGFR2 mAb); Ranibizumab (anti-VEGF mAb); Aflibercept (extracellular domains of VEGFR1 and VEGFR2 fused to IgG1 Fc); AMG386 (angiopoietin-1 and -2 binding peptide fused to IgG1 Fc); Dalotuzumab (anti-IGF-1R mAb); Gemtuzumab ozogamicin (anti-CD33 mAb); Alemtuzumab (anti-Campath-1/CD52 mAb); Brentuximab vedotin (anti-CD30 mAb); Catumaxomab (bispecific mAb that targets epithelial cell adhesion molecule and CD3); Naptumomab (anti-5T4 mAb); Girentuximab (anti-Carbonic anhydrase ix); or Farletuzumab (anti-folate receptor). Other examples include antibodies such as Panorex™ (17-1A) (murine monoclonal antibody); Panorex (@ (17-1A) (chimeric murine monoclonal antibody); BEC2 (ami-idiotypic mAb, mimics the GD epitope) (with BCG); Oncolym (Lym-1 monoclonal antibody); SMART M195 Ab, humanized 13′ 1 LYM-1 (Oncolym), Ovarex (B43.13, anti-idiotypic mouse mAb); 3622W94 mAb that binds to EGP40 (17-1A) pancarcinoma antigen on adenocarcinomas; Zenapax (SMART Anti-Tac (IL-2 receptor); SMART M195 Ab, humanized Ab, humanized); NovoMAb-G2 (pancarcinoma specific Ab); TNT (chimeric mAb to histone antigens); TNT (chimeric mAb to histone antigens); Gliomab-H (Monoclonals—Humanized Abs); GNI-250 Mab; EMD-72000 (chimeric-EGF antagonist); LymphoCide (humanized IL.L.2 antibody); and MDX-260 bispecific, targets GD-2, ANA Ab, SMART IDIO Ab, SMART ABL 364 Ab, ImmuRAIT-CEA, Zanulimumab (anti-CD4 mAb), Keliximab (anti-CD4 mAb); Ipilimumab (MDX-101; anti-CTLA-4 mAb); Tremilimumab (anti-CTLA-4 mAb); Daclizumab (anti-CD25/IL-2R mAb); Basiliximab (anti-CD25/IL-2R mAb); MDX-1106 (anti-PD1 mAb); antibody to GITR; GC1008 (anti-TGF-β antibody); metelimumab/CAT-192 (anti-TGF-β antibody); lerdelimumab/CAT-152 (anti-TGF-β antibody); ID11 (anti-TGF-β antibody); Denosumab (anti-RANKL mAb); BMS-663513 (humanized anti-4-1BB mAb); SGN-40 (humanized anti-CD40 mAb); CP870,893 (human anti-CD40 mAb); Infliximab (chimeric anti-TNF mAb; Adalimumab (human anti-TNF mAb); Certolizumab (humanized Fab anti-TNF); Golimumab (anti-TNF); Etanercept (Extracellular domain of TNFR fused to IgG1 Fc); Belatacept (Extracellular domain of CTLA-4 fused to Fc); Abatacept (Extracellular domain of CTLA-4 fused to Fc); Belimumab (anti-B Lymphocyte stimulator); Muromonab-CD3 (anti-CD3 mAb); Otelixizumab (anti-CD3 mAb); Teplizumab (anti-CD3 mAb); Tocilizumab (anti-IL6R mAb); REGN88 (anti-IL6R mAb); Ustekinumab (anti-IL-12/23 mAb); Briakinumab (anti-IL-12/23 mAb); Natalizumab (anti-α4 integrin); Vedolizumab (anti-α4 β7 integrin mAb); T1h (anti-CD6 mAb); Epratuzumab (anti-CD22 mAb); Efalizumab (anti-CD11a mAb); Urelumab, Utomilumab (anti −41BB mAbs: agonists); BMS 986178 (anti-OX40 mAb: agonist); Elotuzumab (anti-SLAM7/CS1 mAb); Daratumumab (anti-CD38 mAb); Guselkumab (anti-IL23); Nivolumab (anti-PD-1); Pembrolizumab (anti-PD-1); Atezolizumab (anti-PD-L1); Avelumab (anti-PD-L1); Durvalumab (anti-PD-L1); Relatlimab, BMS-986016 (anti-LAG3 mAb); NKTR-214 (CD-122 agonist mAb). Examples of antibodies include those disclosed in U.S. Pat. Nos. 5,736,167, 7,060,808, and 5,821,337.

[0312] Peptides: In some aspects of the invention the targeting moiety or immunomodulatory moiety is a peptide or polypeptide. A peptide includes any analog, fragment or chemical derivative of a peptide whose amino acid residue sequence is shown herein. Therefore, a present peptide can be subject to various changes, substitutions, insertions, and deletions where such changes provide for certain advantages in its use. In this regard, a peptide of this invention corresponds to, rather than is identical to, the sequence of a recited peptide where one or more changes are made and it retains the ability to function as the unmodified peptide in one or more of the assays.

[0313] As used herein “a tumor targeting peptide” includes polymers containing fewer than 100 amino acids, where the polymer specifically binds to a cellular component of a tumor cell, tumor vasculature, and/or a component of a tumor microenvironment.

[0314] A peptide of the present invention can be synthesized by any of the techniques that are known to those skilled in “the polypeptide art, including recombinant DNA techniques. Synthetic chemistry techniques, such as a solid-phase Merrifield-type synthesis, are preferred for reasons of purity, antigenic specificity, freedom from undesired side products, ease of production and the like. An excellent summary of the many techniques available can be found in Steward et al., “Solid Phase Peptide Synthesis”* W. H. Freeman Co., San Francisco, 1969; Bodanszky, et al., “Peptide Synthesis”, John Wiley & Sons, Second Edition, 1976; J. Meienhofer, “Hormonal Proteins and Peptides”. Vol. 2. p. 46, Academic Press (New York), 1983; Merrifield, Adv. Enzymol., 32:221-96, 1969; Fields et al.. Int. J. Peptide Protein Res., 35:161-214, 1990; and U.S. Pat. No. 4,244,946 for solid phase peptide synthesis, and Schroder et al., “The Peptides”, Vol. 1, Academic Press (New York), 1965 for classical solution synthesis. Appropriate protective groups usable in such synthesis are described in the above texts and in J. F. W. McOmie, “Protective Groups in Organic Chemistry”, Plenum Press, New York, 1973.

[0315] In one aspect, the targeting moiety comprises a polypeptide that binds to BTLA, CCR4, CTLA4, LAG3, PD-1, PD-L1, TIGIT, VISTA, 41BB, OX40, GITR, RANKL, TGF-β or VEGF and the immunomodulatory moiety comprises the ECD or a ligand binding fragment thereof of TIM-3. In a specific aspect, the immunomodulatory moiety comprises the CEACAM 1 binding fragment of TIM-3. In another aspect, the targeting moiety comprises a polypeptide that binds to BTLA, CCR4, CTLA4, LAG3, PD-1, PD-L1, TIGIT, VISTA, 41BB, OX40, GITR, RANKL, TGF-β or VEGF and the immunomodulatory moiety comprises the ECD or a ligand binding fragment thereof of CD226. In certain aspects, the ligand binding fragment comprises a CD155 or CD112 binding fragment. In an additional aspect, the targeting moiety comprises a polypeptide that binds to BTLA, CCR4, CTLA4, LAG3, PD-1, PD-L1, TIGIT, VISTA, 41BB, OX40, GITR, TGF-β or VEGF and the immunomodulatory moiety comprises the ECD or a ligand binding fragment thereof of CD44. In a further aspect, the targeting moiety comprises a polypeptide that binds to BTLA, CCR4, CTLA4, LAG3, PD-1, PD-L1, TIGIT, VISTA, 41BB, OX40, GITR, TGF-β or VEGF and the immunomodulatory moiety comprises the ECD or a ligand binding fragment thereof of PD-1. In another aspect, the targeting moiety comprises a polypeptide that binds to BTLA, CCR4, CTLA4, LAG3, PD-1, PD-L1, TIGIT, VISTA, 41BB, OX40, GITR, TGF-β or VEGF and the immunomodulatory moiety comprises the ECD or a ligand binding fragment thereof of VSIG8. In an aspect, the ligand binding fragment comprises a VISTA binding fragment. In certain aspects, the targeting moiety comprises a polypeptide that binds to BTLA, CCR4, CTLA4, LAG3, PD-1, PD-L1, TIGIT, VISTA, 41BB, OX40, GITR, TGF-β or VEGF and the immunomodulatory moiety comprises the ECD or a ligand binding fragment thereof of TGFβRII.

[0316] In an aspect, the molecule comprises sequences corresponding to SEQ ID NOs: 10 and 145; 11 and 146; 12 and 147; 13 and 148; 14 and 149; 15 and 150; 16 and 151; 17 and 152; 18 and 153; 19 and 154, 20 and 155; 21 and 156; 22 and 157; 23 and 158; 24 and 159; 25 and 160; 26 and 161; 27 and 162; 28 and 163; 29 and 164; 30 and 165; 31 and 166; 32 and 167; 33 and 168; 34 and 169; 35 and 170; 37 and 171; 38 and 172; 39 and 173; 40 and 174; 41 and 175; 42 and 176; 43 and 177; 44 and 178; 45 and 179; 46 and 180; 47 and 181; 48 and 182; 49 and 183; 50 and 184; 51 and 185; 52 and 186; 53 and 187; 58 and 188; 59 and 189; 60 and 61; 62 and 63; 64 and 65; 66 and 67; 68 and 69; 70 and 71; 72 and 73; 74 and 75; 76 and 77; 78 and 79; 80 and 81; 82 and 83; 84 and 85; 86 and 87; 88 and 89; 90 and 91; 92 and 93; 94 and 95;, 96 and 97; 98 and 99; 100 and 101; 102 and 103; 104 and 105; 106 and 107; 108 and 109; 110 and 111; 112 and 113; 114 and 115; 116 and 117; 118 and 119; 120 and 121; 122 and 123; 124 and 125; 126 and 127;, 128 and 129; 130 and 131; 132 and 133; 134 and 135; 136 and 137; 138 and 139; 140 and 141; 142 and 143; 192 and 193; 209 and 210; 211 and 212; 221 and 222; 223 and 224; 233 and 234; 235 and 236; 245 and 246; 247 and 248; 257 and 258; 259 and 260; 269 and 270; 271 and 272; 275 and 276; 279 and 280; 283 and 284; 287 and 288; 290 and 291; 292 and 293; 294 and 295; 296 and 297 or 298 and 299.

[0317] In certain aspects, the targeting moiety comprises an antibody that binds PD-1 or PD-L1 and the immunomodulatory moiety comprises the ECD or ligand binding fragment thereof of Tim-3 and/or comprises the sequence of SEQ ID NO: 51, 52, 53 or 192. In one aspect, the targeting moiety comprises an antibody that binds CTLA-4 and the immunomodulatory moiety comprises the ECD or ligand binding fragment thereof of TIM-3. In a specific aspect, the molecule comprises the sequence of SEQ ID NO: 50. In another aspect, the targeting moiety comprises an antibody that binds LAG-3 and the immunomodulatory moiety is the ECD or ligand binding fragment thereof of TIM-3. In one aspect, the molecule comprises the sequence of SEQ ID NO: 26. In an additional aspect, the targeting moiety comprises an antibody that binds VISTA and the immunomodulatory moiety comprises the ECD or ligand binding fragment thereof of TIM-3. In a further aspect, the molecule comprises the sequence of SEQ ID NO: 12. In one aspect, the targeting moiety comprises an antibody that binds TIGIT and the immunomodulatory moiety comprises the ECD or ligand binding fragment thereof of TIM-3. In a specific aspect, the molecule comprises the sequence of SEQ ID NO: 17. In another aspect, the targeting moiety comprises an antibody that binds BTLA and the immunomodulatory moiety comprises the ECD or ligand binding fragment thereof of TIM-3. In an additional, aspect, the molecule comprises the sequence of SEQ ID NO: 22. In an aspect, the targeting moiety comprises s an antibody that binds CCR-4 and the immunomodulatory moiety comprises the ECD or ligand binding fragment thereof of TIM-3. In certain aspects, the molecule comprises the sequence of SEQ ID NO: 31. In a further aspect, the targeting moiety comprises is an antibody that binds 4 1BB and the immunomodulatory moiety comprises the ECD or ligand binding fragment thereof of TIM-3. In a specific aspect, the molecule comprises the sequence of SEQ ID NO: 116. In one aspect, the targeting moiety comprises an antibody that binds VEGF and the immunomodulatory moiety comprises the ECD or ligand binding fragment thereof of TIM-3. In certain aspects, the molecule comprises s the sequence of SEQ ID NO: 88.

[0318] In an additional aspect, the immunomodulatory moiety comprises the ECD or ligand binding fragment thereof of BTLA or LIGHT and the ligand binding fragment comprises an Herpesvirus entry mediator (HVEM, CD 270) binding fragment. In a further aspect, the immunomodulatory moiety comprises the ECD or ligand binding fragment thereof of CCR4 and the ligand binding fragment comprises a CCL22 binding fragment.

[0319] In an additional aspect, the immunomodulatory moiety comprises the ECD or ligand binding fragment thereof of CD160. In an additional aspect, the immunomodulatory moiety comprises the sequence of SEQ ID NO: 300.

[0320] In an additional aspect, the immunomodulatory moiety comprises the ECD or ligand binding fragment thereof of LAIR1. In an additional aspect, the immunomodulatory moiety comprises the sequence of SEQ ID NO: 307.

[0321] In an additional embodiment, the present invention provides molecules comprising a targeting moiety, a first immunomodulatory moiety (IM-1) and a second immunomodulatory moiety (IM-2), wherein the targeting moiety comprises a polypeptide that specifically binds Cytotoxic T lymphocyte associated antigen-4 (CTLA-4, CD152), Programmed Death-1 protein (PD-1), Programmed death ligand-1 (PD-L1), V domain Ig suppressor of T cell activation (VISTA), B and T lymphocyte attenuator (BTLA), T cell Ig and ITM domain (TIGIT), Lymphocyte activation gene-3 (LAG-3), 4-1BB ligand (CD137), OX-40 (CD134), glucocorticoid-induced TNFR-related protein (GITR), Receptor activator of Nuclear factor kappa B ligand (RANKL), transforming growth factor β (TGF-β), IL6R, epidermal growth factor receptor (EGFR), human epidermal growth factor receptor 2 (HER2) or Vascular endothelial growth factor (VEGF), the first immunomodulatory moiety comprises the extracellular ligand-binding sequence or ligand binding fragment thereof of transforming growth factor β receptor II (TGFβRII), programmed death 1 protein (PD-1), T cell immunoglobulin and mucin domain containing 3 (TIM-3), B- and T-lymphocyte attenuator (BTLA), CD226, T cell Ig and ITM domain (TIGIT), CD44, Colony stimulating factor 1 receptor (CSF1R), CCR4, Killer-cell immunoglobulin-like receptor (KIR), Vascular endothelial growth factor receptor (VEGFR), Receptor Activator of Nuclear Factor η B (RANK), V-set and immunoglobulin domain containing 8 (VSIG8), LIGHT (TNFSF14) or V domain Ig suppressor of T cell activation (VISTA); and the second immunomodulatory moiety comprises the extracellular ligand-binding sequence or ligand binding fragment thereof of transforming growth factor β receptor II (TGFβRII), programmed death 1 protein (PD-1), T cell immunoglobulin and mucin domain containing 3 (TIM-3), B- and T-lymphocyte attenuator (BTLA), CD226, T cell Ig and ITM domain (TIGIT), CD44, Colony stimulating factor 1 receptor (CSF1R), CCR4, Killer-cell immunoglobulin-like receptor (KIR), Vascular endothelial growth factor receptor (VEGFR), Receptor Activator of Nuclear Factor η B (RANK), V-set and immunoglobulin domain containing 8 (VSIG8), LIGHT (TNFSF14) or V domain Ig suppressor of T cell activation (VISTA).

[0322] In one aspect, the targeting moiety polypeptide comprises an antigen-binding domain of an immunoglobulin, antibody, bispecific or multispecific antibody, antibody fragment, single chain variable fragment (scFv), bivalent or multivalent scFv, a ligand-binding sequence from the extracellular domain (ECD) of a receptor, or Fc-containing polypeptide. In certain aspects, the polypeptide is an antibody.

[0323] In an additional aspect, the first immunomodulatory moiety is attached to the C-terminus of a heavy chain or a light chain of the antibody; the second immunomodulatory moiety is attached to the C-terminus of a heavy chain or a light chain of the antibody and/or the second immunomodulatory moiety is attached to the first immunomodulatory moiety.

[0324] In a further aspect, the first and second immunomodulatory moiety is attached to the heavy chain or the light chain of the antibody with a linker and/or second immunomodulatory moiety is attached to the first immunomodulatory moiety with a linker. In certain aspects, the linker has the sequence of SEQ ID NO 3.

[0325] In one aspect, the first immunomodulatory moiety is attached to the heavy chain of the antibody and the second immunomodulatory moiety is attached to the light chain of the antibody.

[0326] In certain aspects, the first immunomodulatory moiety comprises the ECD or ligand binding fragment thereof of TIM3 and the second immunomodulatory moiety comprise the ECD or ligand binding fragment thereof of PD-1; the first immunomodulatory moiety comprise the ECD or ligand binding fragment thereof of TGFβRII and the second immunomodulatory moiety comprise the ECD or ligand binding fragment thereof of TIM-3; the first immunomodulatory moiety comprise the ECD or ligand binding fragment thereof of PD-1 and the second immunomodulatory moiety comprise the ECD or ligand binding fragment thereof of TIM-3; and/or the first immunomodulatory moiety comprise the ECD or ligand binding fragment thereof of TGFβRII and the second immunomodulatory moiety comprise the ECD or ligand binding fragment thereof of PD-1. In a further aspect, the targeting moiety specifically binds IL6R, CTLA-4, PD-1, PD-L1, EGFR, HER2, VEGF, or gp120.

[0327] In one aspect, the targeting moiety comprise a polypeptide that binds CTLA-4, the first immunomodulatory moiety comprise the ECD or ligand binding fragment thereof of PD-1, and the second immunomodulatory moiety comprise the ECD or ligand binding fragment thereof of TGFβRII. In one aspect, the molecule comprises SEQ ID NO: 201 and SEQ ID NO: 202. In another aspect, the targeting moiety comprise a polypeptide that binds CTLA-4, the first immunomodulatory moiety comprise the ECD or ligand binding fragment thereof of PD-1, and the second immunomodulatory moiety comprise the ECD or ligand binding fragment thereof of TIM-3. In one aspect, the molecule comprises SEQ ID NO: 205 and SEQ ID NO: 206. In one aspect, the molecule comprises SEQ ID NO: 207 and SEQ ID NO: 208. In another aspect, the targeting moiety comprise a polypeptide that binds CTLA-4, the first immunomodulatory moiety comprise the ECD or ligand binding fragment thereof of TIM-3, and the second immunomodulatory moiety comprise the ECD or ligand binding fragment thereof of TGFβRII. In one aspect, the molecule comprises SEQ ID NO: 203 and SEQ ID NO: 204. In a further aspect, the targeting moiety polypeptide comprise ipilimumab. In a further aspect, this antibody comprise tremilimumab.

[0328] In one aspect, the targeting moiety comprise a polypeptide that binds PD-1 or PD-L1, the first immunomodulatory moiety comprise the ECD or ligand binding fragment thereof of TGFβRII, and the second immunomodulatory moiety comprise the ECD or ligand binding fragment thereof of TIM-3. In one aspect, the molecule comprises SEQ ID NO: 273 and SEQ ID NO: 274. In one aspect, the molecule comprises SEQ ID NO: 277 and SEQ ID NO: 278. In one aspect, the molecule comprises SEQ ID NO: 285 and SEQ ID NO: 286. In one aspect, the molecule comprises SEQ ID NO: 281 and SEQ ID NO: 282. In a further aspect, the targeting moiety polypeptide comprise Nivolumab or pembrolizumab. In a further aspect, this antibody comprise atezolizumab or avelumab or durvalumab.

[0329] In one aspect, the targeting moiety comprise a polypeptide that binds IL-6R, the first immunomodulatory moiety comprise the ECD or ligand binding fragment thereof of PD-1, and the second immunomodulatory moiety comprise the ECD or ligand binding fragment thereof of TGFβRII. In one aspect, the molecule comprises SEQ ID NO: 213 and SEQ ID NO: 214. In another aspect, the targeting moiety comprise a polypeptide that binds IL-6R, the first immunomodulatory moiety comprise the ECD or ligand binding fragment thereof of PD-1, and the second immunomodulatory moiety comprise the ECD or ligand binding fragment thereof of TIM-3. In one aspect, the molecule comprises SEQ ID NO: 217 and SEQ ID NO: 218. In one aspect, the molecule comprises SEQ ID NO: 219 and SEQ ID NO: 220. In another aspect, the targeting moiety comprise a polypeptide that binds IL-6R, the first immunomodulatory moiety comprise the ECD or ligand binding fragment thereof of TIM-3, and the second immunomodulatory moiety comprise the ECD or ligand binding fragment thereof of TGFβRII. In one aspect, the molecule comprises SEQ ID NO: 215 and SEQ ID NO: 216. In a further aspect, the targeting moiety polypeptide comprises an antibody that binds IL-6R. In a further aspect, this antibody comprises tocilizumab.

[0330] In one aspect, the targeting moiety comprise a polypeptide that binds VEGF, the first immunomodulatory moiety comprise the ECD or ligand binding fragment thereof of PD-1, and the second immunomodulatory moiety comprise the ECD or ligand binding fragment thereof of TGFβRII. In one aspect, the molecule comprises SEQ ID NO: 249 and SEQ ID NO: 250. In another aspect, the targeting moiety comprise a polypeptide that binds VEGF, the first immunomodulatory moiety comprise the ECD or ligand binding fragment thereof of PD-1, and the second immunomodulatory moiety comprise the ECD or ligand binding fragment thereof of TIM-3. In one aspect, the molecule comprises SEQ ID NO: 253 and SEQ ID NO: 254. In one aspect, the molecule comprises SEQ ID NO: 255 and SEQ ID NO: 256. In another aspect, the targeting moiety comprise a polypeptide that binds VEGF, the first immunomodulatory moiety comprise the ECD or ligand binding fragment thereof of TIM-3, and the second immunomodulatory moiety comprise the ECD or ligand binding fragment thereof of TGFβRII. In one aspect, the molecule comprises SEQ ID NO: 251 and SEQ ID NO: 252. In a further aspect, the targeting moiety polypeptide comprise Bevacizumab. In a further aspect, targeting moiety comprises a ligand binding ectodomain of VEGFR. In a further aspect, targeting moiety comprise aflibercept.

[0331] In one aspect, the targeting moiety comprise a polypeptide that binds EGFR, the first immunomodulatory moiety comprise the ECD or ligand binding fragment thereof of PD-1, and the second immunomodulatory moiety comprise the ECD or ligand binding fragment thereof of TGFβRII. In one aspect, the molecule comprises SEQ ID NO: 225 and SEQ ID NO: 226. In another aspect, the targeting moiety comprise a polypeptide that binds EGFR, the first immunomodulatory moiety comprise the ECD or ligand binding fragment thereof of PD-1, and the second immunomodulatory moiety comprise the ECD or ligand binding fragment thereof of TIM-3. In one aspect, the molecule comprises SEQ ID NO: 229 and SEQ ID NO: 230. In one aspect, the molecule comprises SEQ ID NO: 231 and SEQ ID NO: 232. In another aspect, the targeting moiety comprises a polypeptide that binds EGFR, the first immunomodulatory moiety comprise the ECD or ligand binding fragment thereof of TIM-3, and the second immunomodulatory moiety comprise the ECD or ligand binding fragment thereof of TGFβRII. In one aspect, the molecule comprises SEQ ID NO: 227 and SEQ ID NO: 228. In a further aspect, the targeting moiety polypeptide comprise Cetuximab or Panitumumab or Necitumumab.

[0332] In one aspect, the targeting moiety comprise a polypeptide that binds HER2/Neu, the first immunomodulatory moiety comprise the ECD or ligand binding fragment thereof of PD-1, and the second immunomodulatory moiety comprise the ECD or ligand binding fragment thereof of TGFβRII. In one aspect, the molecule comprises SEQ ID NO: 237 and SEQ ID NO: 238. In another aspect, the targeting moiety comprise a polypeptide that binds HER2, the first immunomodulatory moiety comprise the ECD or ligand binding fragment thereof of PD-1, and the second immunomodulatory moiety comprise the ECD or ligand binding fragment thereof of TIM-3. In one aspect, the molecule comprises SEQ ID NO: 243 and SEQ ID NO: 244. In one aspect, the molecule comprises SEQ ID NO: 241 and SEQ ID NO: 242. In another aspect, the targeting moiety comprise a polypeptide that binds HER2, the first immunomodulatory moiety comprise the ECD or ligand binding fragment thereof of TIM-3, and the second immunomodulatory moiety comprise the ECD or ligand binding fragment thereof of TGFβRII. In one aspect, the molecule comprises SEQ ID NO: 239 and SEQ ID NO: 240. In a further aspect, the targeting moiety polypeptide comprise Trastuzumab or Pertuzumab.

[0333] In one aspect, the targeting moiety comprise a polypeptide that binds HIV gp120, the first immunomodulatory moiety comprise the ECD or ligand binding fragment thereof of PD-1, and the second immunomodulatory moiety comprise the ECD or ligand binding fragment thereof of TGFβRII. In one aspect, the molecule comprises SEQ ID NO: 261 and SEQ ID NO: 262. In another aspect, the targeting moiety comprise a polypeptide that binds gp120, the first immunomodulatory moiety comprise the ECD or ligand binding fragment thereof of PD-1, and the second immunomodulatory moiety comprise the ECD or ligand binding fragment thereof of TIM-3. In one aspect, the molecule comprises SEQ ID NO: 265 and SEQ ID NO: 266. In one aspect, the molecule comprises SEQ ID NO: 267 and SEQ ID NO: 268. In another aspect, the targeting moiety comprise a polypeptide that binds gp120, the first immunomodulatory moiety comprise the ECD or ligand binding fragment thereof of TIM-3, and the second immunomodulatory moiety comprise the ECD or ligand binding fragment thereof of TGFβRII. In one aspect, the molecule comprises SEQ ID NO: 263 and SEQ ID NO: 264. In a further aspect, the targeting moiety polypeptide comprise Trastuzumab or Pertuzumab.

[0334] In an aspect, the molecule comprises sequences corresponding to SEQ ID NOs: 201 and 202; 203 and 204; 205 and 206; 207 and 208; 213 and 214; 215 and 216; 217 and 218; 219 and 220; 225 and 226; 227 and 228; 229 and 230; 231 and 232; 237 and 238; 239 and 240; 241 and 242 ; 243 and 244; 249 and 250; 251 and 252; 253 and 254; 255 and 256; 261 and 262; 263 and 264; 265 and 266; 267 and 268; 273 and 274; 277 and 278; 281 and 282; 285 and 286.

[0335] In a further embodiment, the present invention provides fusion proteins comprising the extracellular binding domain (ECD) or ligand binding fragment thereof of TIM-3 and the ECD or ligand binding fragment thereof of TGFRβII, PD-1, BTLA, LIGHT, CD226 or VSIG8. In one aspect, the fusion protein comprises the ECD or ligand binding fragment thereof of TIM-3 and the ECD or ligand binding fragment thereof of TGFβRII. In certain aspects, the fusion protein has the sequence of SEQ ID NO: 190. In another aspect, the fusion protein comprises the ECD or ligand binding fragment thereof of TIM-3 and the ECD or ligand binding fragment thereof of PD-1. In specific aspects, the fusion protein comprises the sequence of SEQ ID NO: 195, 196 or 197. In a further aspect, the fusion protein comprises an Fc.

[0336] The terms “fusion molecule” and “fusion protein” are used interchangeably and are meant to refer to a biologically active polypeptide, with or without a further effector molecule, usually a protein or peptide sequence covalently linked (i.e. fused) by recombinant, chemical or other suitable method. If desired, the fusion molecule can include at one or several sites a peptide linker sequence. Alternatively, the peptide linker may be used to assist in construction of the fusion molecule. Specifically preferred fusion molecules are fusion proteins. Generally, fusion molecule also can include conjugate molecules.

[0337] In a further embodiment, the present invention provides fusion proteins comprising the extracellular binding domain (ECD) or ligand binding fragment thereof of TIM-3 and the ECD or ligand binding fragment thereof of TGFRβII, PD-1, BTLA, LIGHT, CD226 or VSIG8. In one aspect, the fusion protein comprises the ECD or ligand binding fragment thereof of TIM-3 and the ECD or ligand binding fragment thereof of TGFβRII. In certain aspects, the fusion protein comprises the sequence of SEQ ID NO: 190. In another aspect, the fusion protein comprises the ECD or ligand binding fragment thereof of TIM-3 and the ECD or ligand binding fragment thereof of PD-1. In specific aspects, the fusion protein comprises the sequence of SEQ ID NO: 195, 196 or 197. In a further aspect, the fusion protein comprises an Fc.

[0338] In another embodiment, the present invention provides a fusion protein of a Fc-containing polypeptide and the ECD or ligand binding fragment thereof of TIM-3, where the TIM-3 ECD is specifically fused to the C terminus of the Fc-containing polypeptide.

[0339] In a further embodiment, the present invention provides a method of treatment comprising a fusion protein of an immunoglobulin Fc and the ECD or ligand binding fragment thereof of TIM-3, and an antibody that binds PD-1 or PD-L1. In one aspect, the structure of said fusion protein is of the form (N terminus) Fc-TIM3 (C terminus). In another aspect, the structure of said fusion protein is of the form (N terminus) TIM3-Fc (C terminus).

[0340] In one embodiment, the composition of the present invention might for example be used in combination with antibody-ligand traps. For example, the antibody-ligand traps disclosed in U.S. Pat. No. 8,993,524, 9,441,044, and 9,850,306 may be used in combination with the composition of the present invention.

[0341] In one embodiment, the present invention provides for compositions comprising the previously described molecule or fusion protein and a pharmaceutically acceptable carrier.

[0342] By “pharmaceutically acceptable” it is meant the carrier, diluent or excipient must be compatible with the other ingredients of the formulation and not deleterious to the recipient thereof.

[0343] In an additional embodiment, the present invention provides a method of treating a subject having cancer or an infectious disease comprising administering to the subject the previously described molecules, fusion proteins or compositions.

[0344] The term “treatment” is used interchangeably herein with the term “therapeutic method” and refers to both 1) therapeutic treatments or measures that cure, slow down, lessen symptoms of, and/or halt progression of a diagnosed pathologic conditions or disorder, and 2) and prophylactic/preventative measures. Those in need of treatment may include individuals already having a particular medical disorder as well as those who may ultimately acquire the disorder (i.e., those needing preventive measures).

[0345] The terms “administration of” and or “administering” should be understood to mean providing a pharmaceutical composition in a therapeutically effective amount to the subject in need of treatment. Administration routes can be enteral, topical or parenteral. As such, administration routes include but are not limited to intracutaneous, subcutaneous, intravenous, intraperitoneal, intraarterial, intrathecal, intracapsular, intraorbital, intracardiac, intradermal, transdermal, transtracheal, subcuticular, intraarticulare, subcapsular, subarachnoid, intraspinal and intrasternal, oral, sublingual buccal, rectal, vaginal, nasal ocular administrations, as well infusion, inhalation, and nebulization. The phrases “parenteral administration” and “administered parenterally” as used herein means modes of administration other than enteral and topical administration.

[0346] The terms “therapeutically effective amount”, “effective dose,” “therapeutically effective dose”, “effective amount,” or the like refer to that amount of the subject compound that will elicit the biological or medical response of a tissue, system, animal or human that is being sought by the researcher, veterinarian, medical doctor or other clinician. Generally, the response is either amelioration of symptoms in a patient or a desired biological outcome. The effective amount can be determined as described herein.

[0347] The term “subject” as used herein refers to any individual or patient to which the subject methods are performed. Generally the subject is human, although as will be appreciated by those in the art, the subject may be an animal. Thus other animals, including vertebrate such as rodents (including mice, rats, hamsters and guinea pigs), cats, dogs, rabbits, farm animals including cows, horses, goats, sheep, pigs, chickens, etc., and primates (including monkeys, chimpanzees, orangutans and gorillas) are included within the definition of subject.

[0348] The term “cancer” refers to a group diseases characterized by abnormal and uncontrolled cell proliferation starting at one site (primary site) with the potential to invade and to spread to others sites (secondary sites, metastases) which differentiate cancer (malignant tumor) from benign tumor. Virtually all the organs can be affected, leading to more than 100 types of cancer that can affect humans. Cancers can result from many causes including genetic predisposition, viral infection, exposure to ionizing radiation, exposure environmental pollutant, tobacco and or alcohol use, obesity, poor diet, lack of physical activity or any combination thereof.

[0349] As used herein, “neoplasm” or “tumor” including grammatical variations thereof, means new and abnormal growth of tissue, which may be benign or cancerous. In a related aspect, the neoplasm is indicative of a neoplastic disease or disorder, including but not limited, to various cancers. For example, such cancers can include prostate, pancreatic, biliary, colon, rectal, liver, kidney, lung, testicular, breast, ovarian, pancreatic, brain, and head and neck cancers, melanoma, sarcoma, multiple myeloma, leukemia, lymphoma, and the like.

[0350] Exemplary cancers described by the National Cancer Institute include: Acute Lymphoblastic Leukemia, Adult; Acute Lymphoblastic Leukemia, Childhood; Acute Myeloid Leukemia, Adult; Adrenocortical Carcinoma; Adrenocortical Carcinoma, Childhood; AIDS-Related Lymphoma; AIDS-Related Malignancies; Anal Cancer; Astrocytoma, Childhood Cerebellar; Astrocytoma, Childhood Cerebral; Bile Duct Cancer, Extrahepatic; Bladder Cancer; Bladder Cancer, Childhood; Bone Cancer, Osteosarcoma/Malignant Fibrous Histiocytoma; Brain Stem Glioma, Childhood; Brain Tumor, Adult; Brain Tumor, Brain Stem Glioma, Childhood; Brain Tumor, Cerebellar Astrocytoma, Childhood; Brain Tumor, Cerebral Astrocytoma/Malignant Glioma, Childhood; Brain Tumor, Ependymoma, Childhood; Brain Tumor, Medulloblastoma, Childhood; Brain Tumor, Supratentorial Primitive Neuroectodermal Tumors, Childhood; Brain Tumor, Visual Pathway and Hypothalamic Glioma, Childhood; Brain Tumor, Childhood (Other); Breast Cancer; Breast Cancer and Pregnancy; Breast Cancer, Childhood; Breast Cancer, Male; Bronchial Adenomas/Carcinoids, Childhood: Carcinoid Tumor, Childhood; Carcinoid Tumor, Gastrointestinal; Carcinoma, Adrenocortical; Carcinoma, Islet Cell; Carcinoma of Unknown Primary; Central Nervous System Lymphoma, Primary; Cerebellar Astrocytoma, Childhood; Cerebral Astrocytoma/Malignant Glioma, Childhood; Cervical Cancer; Childhood Cancers; Chronic Lymphocytic Leukemia; Chronic Myelogenous Leukemia; Chronic Myeloproliferative Disorders; Clear Cell Sarcoma of Tendon Sheaths; Colon Cancer; Colorectal Cancer, Childhood; Cutaneous T-Cell Lymphoma; Endometrial Cancer; Ependymoma, Childhood; Epithelial Cancer, Ovarian; Esophageal Cancer; Esophageal Cancer, Childhood; Ewing's Family of Tumors; Extracranial Germ Cell Tumor, Childhood; Extragonadal Germ Cell Tumor; Extrahepatic Bile Duct Cancer; Eye Cancer, Intraocular Melanoma; Eye Cancer, Retinoblastoma; Gallbladder Cancer; Gastric (Stomach) Cancer; Gastric (Stomach) Cancer, Childhood; Gastrointestinal Carcinoid Tumor; Germ Cell Tumor, Extracranial, Childhood; Germ Cell Tumor, Extragonadal; Germ Cell Tumor, Ovarian; Gestational Trophoblastic Tumor; Glioma. Childhood Brain Stem; Glioma. Childhood Visual Pathway and Hypothalamic; Hairy Cell Leukemia; Head and Neck Cancer; Hepatocellular (Liver) Cancer, Adult (Primary); Hepatocellular (Liver) Cancer, Childhood (Primary); Hodgkin's Lymphoma, Adult; Hodgkin's Lymphoma, Childhood; Hodgkin's Lymphoma During Pregnancy; Hypopharyngeal Cancer; Hypothalamic and Visual Pathway Glioma, Childhood; Intraocular Melanoma; Islet Cell Carcinoma (Endocrine Pancreas); Kaposi's Sarcoma; Kidney Cancer; Laryngeal Cancer; Laryngeal Cancer, Childhood; Leukemia, Acute Lymphoblastic, Adult; Leukemia, Acute Lymphoblastic, Childhood; Leukemia, Acute Myeloid, Adult; Leukemia, Acute Myeloid, Childhood; Leukemia, Chronic Lymphocytic; Leukemia, Chronic Myelogenous; Leukemia, Hairy Cell; Lip and Oral Cavity Cancer; Liver Cancer, Adult (Primary); Liver Cancer, Childhood (Primary); Lung Cancer, Non-Small Cell; Lung Cancer, Small Cell; Lymphoblastic Leukemia, Adult Acute; Lymphoblastic Leukemia, Childhood Acute; Lymphocytic Leukemia, Chronic; Lymphoma, AIDS-Related; Lymphoma, Central Nervous System (Primary); Lymphoma, Cutaneous T-Cell; Lymphoma, Hodgkin's, Adult; Lymphoma, Hodgkin's; Childhood; Lymphoma, Hodgkin's During Pregnancy; Lymphoma, Non-Hodgkin's, Adult; Lymphoma, Non-Hodgkin's, Childhood; Lymphoma, Non-Hodgkin's During Pregnancy; Lymphoma, Primary Central Nervous System; Macroglobulinemia, Waldenstrom's; Male Breast Cancer; Malignant Mesothelioma, Adult; Malignant Mesothelioma, Childhood; Malignant Thymoma; Medulloblastoma, Childhood; Melanoma; Melanoma, Intraocular; Merkel Cell Carcinoma; Mesothelioma, Malignant; Metastatic Squamous Neck Cancer with Occult Primary; Multiple Endocrine Neoplasia Syndrome, Childhood; Multiple Myeloma/Plasma Cell Neoplasm; Mycosis Fungoides; Myelodysplasia Syndromes; Myelogenous Leukemia, Chronic; Myeloid Leukemia, Childhood Acute; Myeloma, Multiple; Myeloproliferative Disorders, Chronic; Nasal Cavity and Paranasal Sinus Cancer; Nasopharyngeal Cancer; Nasopharyngeal Cancer, Childhood; Neuroblastoma; Non-Hodgkin's Lymphoma, Adult; Non-Hodgkin's Lymphoma, Childhood; Non-Hodgkin's Lymphoma During Pregnancy; Non-Small Cell Lung Cancer; Oral Cancer, Childhood; Oral Cavity and Lip Cancer; Oropharyngeal Cancer; Osteosarcoma/Malignant Fibrous Histiocytoma of Bone; Ovarian Cancer, Childhood; Ovarian Epithelial Cancer; Ovarian Germ Cell Tumor; Ovarian Low Malignant Potential Tumor; Pancreatic Cancer; Pancreatic Cancer, Childhood', Pancreatic Cancer, Islet Cell; Paranasal Sinus and Nasal Cavity Cancer; Parathyroid Cancer; Penile Cancer; Pheochromocytoma; Pineal and Supratentorial Primitive Neuroectodermal Tumors, Childhood; Pituitary Tumor; Plasma Cell Neoplasm/Multiple Myeloma; Pleuropulmonary Blastoma; Pregnancy and Breast Cancer; Pregnancy and Hodgkin's Lymphoma; Pregnancy and Non-Hodgkin's Lymphoma; Primary Central Nervous System Lymphoma; Primary Liver Cancer, Adult; Primary Liver Cancer, Childhood; Prostate Cancer; Rectal Cancer; Renal Cell (Kidney) Cancer; Renal Cell Cancer, Childhood; Renal Pelvis and Ureter, Transitional Cell Cancer; Retinoblastoma; Rhabdomyosarcoma, Childhood; Salivary Gland Cancer; Salivary Gland'Cancer, Childhood; Sarcoma, Ewing's Family of Tumors; Sarcoma, Kaposi's; Sarcoma (OsteosarcomaVMalignant Fibrous Histiocytoma of Bone; Sarcoma, Rhabdomyosarcoma, Childhood; Sarcoma, Soft Tissue, Adult; Sarcoma, Soft Tissue, Childhood; Sezary Syndrome; Skin Cancer; Skin Cancer, Childhood; Skin Cancer (Melanoma); Skin Carcinoma, Merkel Cell; Small Cell Lung Cancer; Small Intestine Cancer; Soft Tissue Sarcoma, Adult; Soft Tissue Sarcoma, Childhood; Squamous Neck Cancer with Occult Primary, Metastatic; Stomach (Gastric) Cancer; Stomach (Gastric) Cancer, Childhood; Supratentorial Primitive Neuroectodermal Tumors, Childhood; T-Cell Lymphoma, Cutaneous; Testicular Cancer; Thymoma, Childhood; Thymoma, Malignant; Thyroid Cancer; Thyroid Cancer, Childhood; Transitional Cell Cancer of the Renal Pelvis and Ureter; Trophoblastic Tumor, Gestational; Unknown Primary Site, Cancer of, Childhood; Unusual Cancers of Childhood; Ureter and Renal Pelvis, Transitional Cell Cancer; Urethral Cancer; Uterine Sarcoma; Vaginal Cancer; Visual Pathway and Hypothalamic Glioma, Childhood; Vulvar Cancer; Waldenstrom's Macro globulinemia; and Wilms' Tumor.

[0351] As used herein the term “infectious disease” refers to a disease resulting from an infection. An infection is the invasion of an organism's body tissues by disease-causing agents, their multiplication, and the reaction of host tissues to the infectious agents and the toxins they produce. Infectious agents include viruses, viroids, prions, bacteria, nematodes such as parasitic roundworms and pinworms, arthropods such as ticks, mites, fleas, and lice, fungi such as ringworm, and other macroparasites such as tapeworms and other helminths. A short-term infection is an acute infection, accordingly and as used herein “chronic infection” refers to a long-term infection or to a persistent infection.

[0352] Infectious diseases include: Acute Flaccid Myelitis (AFM); Anaplasmosis; Anthrax; Babesiosis; Botulism; Brucellosis; Burkholderia mallei (Glanders); Burkholderia pseudomallei (Melioidosis); Campylobacteriosis (Campylobacter); Carb apenem-resistant Infection (CRE/CRPA); Chancroid; Chikungunya Virus Infection (Chikungunya); Chlamydia; Ciguatera; Clostridium Difficile Infection; Clostridium Perfringens (Epsilon Toxin); Coccidioidomycosis fungal infection (Valley fever); Creutzfeldt-Jacob Disease, transmissible spongiform encephalopathy (CJD); Cryptosporidiosis (Crypto); Cyclosporiasis; Dengue , 1,2,3,4 (Dengue Fever); Diphtheria; E. coli infection (E. Coli); Eastern Equine Encephalitis (EEE); Ebola Hemorrhagic Fever (Ebola); Ehrlichiosis; Encephalitis; Arboviral or parainfectious; Enterovirus Infection , Non-Polio (Non-Polio Enterovirus); Enterovirus Infection; D68 (EV-D68); Giardiasis (Giardia); Gonococcal Infection (Gonorrhea); Granuloma inguinale; Haemophilus Influenza disease; Type B (Hib or H-flu); Hantavirus Pulmonary Syndrome (HP S); Hemolytic Uremic Syndrome (HUS); Hepatitis A (Hep A); Hepatitis B (Hep B); Hepatitis C (Hep C); Hepatitis D (Hep D); Hepatitis E (Hep E); Herpes; Herpes Zoster; zoster VZV (Shingles); Histoplasmosis infection (Histoplasmosis); Human Immunodeficiency Virus/AIDS (HIV/AIDS); Human Papillomarivus (HPV); Influenza (Flu); Lead Poisoning; Legionellosis (Legionnaires Disease); Leprosy (Hansens Disease); Leptospirosis; Listeriosis (Listeria); Lyme Disease; Lymphogranuloma venereum infection (LVG); Malaria; Measles; Meningitis; Viral (Meningitis, viral); Meningococcal Disease; Bacterial (Meningitis, bacterial); Middle East Respiratory Syndrome Coronavirus (MERS-CoV); Mumps; Norovirus; Paralytic Shellfish Poisoning (Paralytic Shellfish Poisoning, Ciguatera); Pediculosis (Lice, Head and Body Lice); Pelvic Inflammatory Disease (PID); Pertussis (Whooping Cough); Plague; Bubonic, Septicemic, Pneumonic (Plague); Pneumococcal Disease (Pneumonia); Poliomyelitis (Polio); Powassan; Psittacosis; Pthiriasis (Crabs; Pubic Lice Infestation); Pustular Rash diseases (Small pox, monkeypox, cowpox); Q-Fever; Rabies; Ricin Poisoning; Rickettsiosis (Rocky Mountain Spotted Fever); Rubella, Including congenital (German Measles); Salmonellosis gastroenteritis (Salmonella); Scabies Infestation (Scabies); Scombroid; Severe Acute Respiratory Syndrome (SARS); Shigellosis gastroenteritis (Shigella); Smallpox; Staphyloccal Infection, Methicillin-resistant (MRSA); Staphylococcal Food Poisoning; Enterotoxin—B Poisoning (Staph Food Poisoning); Staphylococcal Infection; Vancomycin Intermediate (VISA); Staphylococcal Infection; Vancomycin Resistant (VRSA); Streptococcal Disease; Group A (invasive) (Strep A); Streptococcal Disease; Group B (Strep-B); Streptococcal Toxic-Shock Syndrome; STSS; Toxic Shock (STSS, TSS); Syphilis, primary, secondary, early latent, late latent, congenital; Tetanus Infection; tetani (Lock Jaw); Trichonosis Infection (Trichinosis); Tuberculosis (TB); Tuberculosis (Latent) (LTBI); Tularemia (Rabbit fever); Typhoid Fever; Group D; Typhus; Vaginosis , bacterial (Yeast Infection); Varicella (Chickenpox); Vibrio cholerae (Cholera); Vibriosis (Vibrio); Viral Hemorrhagic Fever (Ebola, Lassa, Marburg);West Nile Virus; Yellow Fever; Yersenia (Yersinia); Zika Virus Infection (Zika); Acinetobacter infections; Actinomycosis; African sleeping sickness (African trypanosomiasis); Amebiasis Anaplasmosis; Anisakiasis; Arcanobacterium haemolyticum infection; Argentine Teagan fever; Ascariasis; Aspergillosis; Astrovirus infection; Bacillus cereus infection; Bacterial pneumonia; Bacterial vaginosis; Balantidiasis; Bartonellosis; Baylisascaris infection; BK virus infection; Black piedra; Blastocystosis; Bolivian hemorrhagic fever; Brazilian hemorrhagic fever; Bubonic plague; Buruli ulcer; Calicivirus infection; Campylobacteriosis; Candidiasis; Capillariasis Intestinal disease; Carrion's disease Bartonella bacilliformis; Cat-scratch disease Bartonella henselae; Cellulitis usually; Chagas Disease (American trypanosomiasis); Chancroid; Chickenpox; Chlamydophila pneumoniae infection; Chromoblastomycosis; Chytridiomycosis; Clonorchiasis; Colorado tick fever (CTF); Common cold; Crimean-Congo hemorrhagic fever (CCHF); Cryptosporidiosis; Cutaneous larva migrans (CLM); Cyclosporiasis; Cysticercosis; Cytomegalovirus infection; Desmodesmus infection ; Dientamoebiasis; Diphtheria; Diphyllobothriasis; Dracunculiasis; Echinococcosis; Ehrlichiosis; Enterobiasis (Pinworm infection); Enterococcus infection; Enterovirus infection; Epidemic typhus Rickettsia prowazekii ; Erythema infectiosum (Fifth disease); Exanthem subitum (Sixth disease); Fasciolasis; Fasciolopsiasis; Fatal familial insomnia (FFI) ; Filariasis; Free-living amebic infection multiple ; Fusobacterium infection; Gas gangrene (Clostridial myonecrosis); Gerstmann-Sträussler-Scheinker syndrome (GSS); Giardiasis; Glanders; Gnathostomiasis; Granuloma inguinale (Donovanosis); streptococcal infection; Haemophilus influenzae infection; Hand, foot and mouth disease (HFMD); Hantavirus Pulmonary Syndrome (HPS) Sin Nombre virus; Heartland virus disease Heartland virus; Helicobacter pylori infection; Hemolytic-uremic syndrome (HUS) E; Hemorrhagic fever with renal syndrome (HFRS); Histoplasmosis; Hookworm infection; Human bocavirus infection; Human ewingii; Human granulocytic anaplasmosis (HGA); Human metapneumovirus infection; Human monocytic ehrlichiosis; Human papillomavirus (HPV) infection; Human parainfluenza virus infection; Hymenolepiasis; Epstein-Barr virus infectious mononucleosis (Mono); Influenza (flu); Isosporiasis; Kawasaki disease; Keratitis multiple; Kingella kingae infection; Kuru PRNP; Lassa fever; Legionellosis (Pontiac fever); Leishmaniasis; Leprosy; Leptospirosis Leptospira species; Lymphatic filariasis (Elephantiasis); Lymphocytic choriomeningitis; Middle East respiratory syndrome (MERS); Melioidosis (Whitmore's disease); Meningitis multiple; Meningococcal disease; Metagonimiasis; Microsporidiosis; Molluscum contagiosum (MC); Monkeypox; Mumps; Murine typhus (Endemic typhus); Mycoplasma pneumonia; Mycetoma (disambiguation); Myiasis parasitic; Neonatal conjunctivitis (Ophthalmia neonatorum); Norovirus (children and babies) Norovirus; Nocardiosis; Onchocerciasis (River blindness); Opisthorchiasis; Paracoccidioidomycosis (South American blastomycosis); Paragonimiasis; Pasteurellosis; Pediculosis capitis (Head lice); Pediculosis corporis (Body lice); Pediculosis pubis (Pubic lice, Crab lice); Pelvic inflammatory disease (PID); Pertussis (Whooping cough); Plague; Pneumococcal infection; Pneumocystis pneumonia (PCP); Pneumonia multiple; Poliomyelitis; Prevotella infection; Primary amoebic meningoencephalitis (PAM); Progressive multifocal leukoencephalopathy; Psittacosis; Q fever; Rabies; Relapsing fever; Respiratory syncytial virus infection Respiratory syncytial virus (RSV); Rhinosporidiosis; Rhinovirus infection; Rickettsial infection; Rickettsialpox; Rift Valley fever (RVF); Rocky Mountain spotted fever (RMSF); Rotavirus infection; Rubella; Salmonellosis; SARS (Severe Acute Respiratory Syndrome); Scabies; Scarlet fever Group A S; Sepsis multiple; Shigellosis (Bacillary dysentery); Shingles (Herpes zoster); Smallpox (Variola); Sporotrichosis; Staphylococcal food poisoning; Staphylococcal infection; Strongyloidiasis; Syphilis; Taeniasis; Tetanus (Lockjaw); Tinea barbae (Barber's itch); Tinea capitis (Ringworm of the Scalp); Tinea corporis (Ringworm of the Body); Tinea cruris (Jock itch); Tinea manum (Ringworm of the Hand); Tinea nigra; Tinea pedis (Athlete's foot); Tinea unguium (Onychomycosis); Tinea versicolor (Pityriasis versicolor); Toxocariasis (Ocular Larva Migrans (OLM)); Toxocariasis (Visceral Larva Migrans (VLM)); Toxoplasmosis; Trachoma; Trichinosis; Trichomoniasis; Trichuriasis (Whipworm infection); Tuberculosis; Tularemia; Typhoid fever; Typhus fever; Ureaplasma urealyticum infection; Valley fever; Venezuelan equine encephalitis V; Venezuelan hemorrhagic fever; Vibrio vulnificus infection; Vibrio parahaemolyticus; Viral pneumonia; West Nile Fever; White piedra (Tinea blanca); Yersinia pseudotuberculosis infection; Yersiniosis; Zygomycosis.

[0353] In some aspects administration can be in combination with one or more additional therapeutic agents. The phrases “combination therapy”, “combined with” and the like refer to the use of more than one medication or treatment simultaneously to increase the response. The composition of the present invention might for example be used in combination with other drugs or treatment such as immunotherapies or chemotherapies. Such therapies can be administered prior to, simultaneously with, or following administration of the composition of the present invention.

[0354] The term “chemotherapeutic agent” as used herein refers to any therapeutic agent used to treat cancer. Examples of chemotherapeutic agents include, but are not limited to, Actinomycin, Azacitidine, Azathioprine, Bleomycin, Bortezomib, Carboplatin, Capecitabine, Cisplatin, Chlorambucil, Cyclophosphamide, Cytarabine, Daunorubicin, Docetaxel, Doxifluridine, Doxorubicin, Epirubicin, Epothilone, Etoposide, Fiuorouracil, Gemcitabine, Hydroxyurea, Idarubicin, Imatinib, lrinotecan, Mechlorethamine, Mercaptopurine, Methotrexate, Mitoxantrone, Oxaliplatin, Paclitaxel, Pemetrexed, Teniposide, Tioguanine, Topotecan, Valrubicin, Vinblastine, Vincristine, Vindesine, Vinorelbine, panitumamab, Erbitux (cetuximab), matuzumab, IMC-IIF 8, TheraCIM hR3, denosumab, Avastin (bevacizumab), Humira (adalimumab), Herceptin (trastuzumab), Remicade (infliximab), rituximab, Synagis (palivizumab), Mylotarg (gemtuzumab oxogamicin), Raptiva (efalizumab), Tysabri (natalizumab), Zenapax (dacliximab), NeutroSpec (Technetium (99mTc) fanolesomab), tocilizumab, ProstaScint (Indium-Ill labeled Capromab Pendetide), Bexxar (tositumomab), Zevalin (ibritumomab tiuxetan (IDEC-Y2B8) conjugated to yttrium 90), Xolair (omalizumab), MabThera (Rituximab), ReoPro (abciximab), MabCampath (alemtuzumab), Simulect (basiliximab), LeukoScan (sulesomab), CEA-Scan (arcitumomab), Verluma (nofetumomab), Panorex (Edrecolomab), alemtuzumab, CDP 870, natalizumab Gilotrif (afatinib), Lynparza (olaparib), Perj eta (pertuzumab), Otdivo (nivolumab), Bosulif (bosutinib), Cabometyx (cabozantinib), Ogivri (trastuzumab-dkst), Sutent (sunitinib malate), Adcetris (brentuximab vedotin), Alecensa (alectinib), Calquence (acalabrutinib), Yescarta (ciloleucel), Verzenio (abemaciclib), Keytruda (pembrolizumab), Aliqopa (copanlisib), Nerlynx (neratinib), Imfinzi (durvalumab), Darzalex (daratumumab), Tecentriq (atezolizumab), and Tarceva (erlotinib). Examples of immunotherapeutic agent include, but are not limited to, interleukins (11-2, 11-7, 11-12), cytokines (Interferons, G-CSF, imiquimod), chemokines (CCL3, CC126, CXCL7), immunomodulatory imide drugs (thalidomide and its analogues).

[0355] Examples of antibiotics, include but are not limited to, Amikacin; Gentamicin; Kanamycin; Neomycin; Netilmicin; Tobramycin; Paromomycin; Streptomycin; Spectinomycin; Geldanamycin; Herbimycin; Rifaximin; Loracarbef; Ertapenem; Doripenem; Imipenem/Cilastatin; Meropenem; Cefadroxil; Cefazolin; Cefalexin; Cefaclor; Cefprozil; Cefuroxime; Cefixime; Cefdinir; Cefditoren; Cefoperazone; Cefotaxime; Cefpodoxime; Ceftazidime; Ceftibuten; Ceftriaxone; Cefepime; Ceftaroline fosamil; Ceftobiprole; Teicoplanin; Vancomycin; Telavancin; Dalbavancin; Oritavancin; Lincosamides; Clindamycin; Lincomycin; Lipopeptide; Daptomycin; Macrolides; Azithromycin; Clarithromycin; Erythromycin; Roxithromycin; Telithromycin; Spiramycin; Monobactams; Aztreonam; Nitrofurans; Furazolidone; Nitrofurantoin; Oxazolidinones; Linezolid; Posizolid; Radezolid; Torezolid; Penicillins; Amoxicillin; Ampicillin; Azlocillin; Dicloxacillin; Flucloxacillin; Mezlocillin; Methicillin; Nafcillin; Oxacillin; Penicillin G; Penicillin V; Piperacillin; Penicillin G; Temocillin; Ticarcillin; Penicillin combinations; Amoxicillin/clavulanate; Ampicillin/sulbactam; Piperacillin/tazobactam; Ticarcillin/clavulanate; Polypeptides; Bacitracin; Colistin; Polymyxin B; Ciprofloxacin; Enoxacin; Gatifloxacin; Gemifloxacin; Levofloxacin; Lomefloxacin; Moxifloxacin; Nadifloxacin; Nalidixic acid; Norfloxacin; Ofloxacin; Trovafloxacin; Grepafloxacin; Sparfloxacin; Temafloxacin; Sulfonamides; Mafenide; Sulfacetamide; Sulfadiazine; Silver sulfadiazine; Sulfadimethoxine; Sulfamethizole; Sulfamethoxazole; Sulfanilimide; Sulfasalazine; Sulfisoxazole; Trimethoprim-Sulfamethoxazole; Sulfonamidochrysoidine; Tetracyclines; Demeclocycline; Doxycycline; Metacycline; Minocycline; Oxytetracycline; Tetracycline; Clofazimine; Dapsone; Capreomycin; Cycloserine; Ethambutol; Ethionamide; Isoniazid; Pyrazinamide; Rifampicin; Rifabutin; Rifapentine; Streptomycin; Arsphenamine; Chloramphenicol;Fosfomycin; Fusidic acid; Metronidazole; Mupirocin; Platensimycin; Quinupristin/Dalfopristin; Thiamphenicol; Tigecycline; Tinidazole and Trimethoprim.

[0356] In another embodiment, the present invention provides a method of inducing or promoting immune tolerance. The method includes administering to a subject in need thereof one or more molecule of the invention.

[0357] The following examples are provided to further illustrate the embodiments of the present invention, but are not intended to limit the scope of the invention. While they are typical of those that might be used, other procedures, methodologies, or techniques known to those skilled in the art may alternatively be used.

### EXAMPLES

[0358] Despite compelling antitumor activity of antibodies targeting the programmed death 1 (PD-1): programmed death ligand 1 (PD-L1) immune checkpoint, both de novo and adaptive resistance to these therapies is frequently observed. Targeting the PD-1/PD-L1 pathway may not be sufficient to break dysfunction in exhausted T cells, as complex cross-regulation exists between PD-1 and other checkpoint inhibitors to restrain anti-tumor T cell immunity, and in certain cases PD-1 blockade may be followed by development of adaptive resistance. The TIM-3/CEACAM1 axis is a key determinant of de novo and adaptive resistance to PD-1/PD-L1 therapy.

[0359] TIM-3/CEACAM1 exert multipronged suppression of T cells and NK cells via: (i) heterophilic TIM-3/CEACAM-1 interactions (cis CEACAM-1/TIM-3 heterodimerization; trans CEACAM1 heterodimerization with TIM-3); (ii) homophilic CEACAM-1/CEACAM-1 interactions (cis CEACAM-1 dimerization; trans CEACAM1-induced cis CEACAM-1 dimerization). Accordingly, tumor-infiltrating CD8+ T lymphocytes co-expressing TIM-3 and CEACAM1 exhibit the most exhausted phenotype in both mouse models and patients with cancer.

[0360] Since PD-1, TIM-3, and CEACAM-1 entrain independent and cooperative mechanisms of immune tolerance and T cell exhaustion in the tumor microenvironment, simultaneous blockade of these checkpoints is required to unleash potent antitumor innate and adaptive antitumor immune responses. Besides elevated co-expression of all three T cell inhibitory receptors (TCIRs: PD-1, TIM-3, CEACAM-1) on tumor-infiltrating immune cells, tumor cells also co-express multiple ligands that engage these TCIRs to suppress tumor-reactive T cells (PD-L1, CEACAM-1, Galectin-9). This poses the therapeutic challenge of disrupting multiple autocrine/paracrine cis and trans TCIR/ligand interactions in the TME that act in concert to induce immune tolerance (PD-1/PD-L1; Tim-3/CEACAM-1; CEACAM-1/CEACAM-1). This therapeutic challenge was addressed by inventing novel bifunctional antibody-ligand traps (Y-traps): (i) α-PDL1-TIM3ecd comprising an antibody targeting PD-L1 fused to a TIM-3 IgV ectodomain sequence; (ii) α-PD1-TIM3ecd comprising an antibody targeting PD-1 fused to a TIM-3 IgV ectodomain sequence.

[0361] Mechanism of Action for aPDL1-TIM3ecd and aPD1-TIM3ecd: aPDL1-TIM3ecd and aPD1-TIM3ecd bind PD-1 or PD-L1 on activated T cells and tumor cells, and simultaneously decorate them with a TIM-3ecd decoy which effectively competes with native cellular TIM-3 for binding the FG-CC′ cleft interface of CEACAM-1. As such these antibody-ligand traps not only disable PD-L1/PD-1 interactions, but simultaneously disrupt both cis and trans interactions involving Tim-3/CEACAM-1 as well as CEACAM-1/CEACAM-1 in the tumor microenvironment (TME). These studies demonstrate that a-PDL1-TIM3ecd and a-PD1-TIM3ecd are significantly more effective than either a-PDL1 (atezolizumab) or a-PD-1 (pembrolizumab), in promoting IFNγ expression and counteracting exhaustion of co-stimulated T cells in vitro. Most significantly, it was found that in vivo treatment of tumor-bearing humanized mice with these antibody-ligand traps results in a striking increase in the number of tumor-infiltrating CD4+ and CD8+ T cells, and is significantly more effective in inhibiting tumor progression compared to equivalent treatment with a-PDL1 (atezolizumab), a-PD-1 (pembrolizumab), a-Tim-3 antibody, or even a combination of a-PDL1 and a-Tim-3. These data demonstrate that heterophilic and homophilic Tim-3/CEACAM-1 interactions in the tumor microenvironment limit the antitumor efficacy of PD-1/PD-L1 inhibitors, and that a-PDL1-TIM3ecd and a-PD1-TIM3ecd provide a more effective immunotherapeutic strategy to counteract or reverse T cell exhaustion by simultaneously disabling the PD-1/PD-L1 checkpoint and counteracting both components of the Tim-3/CEACAM-1 axis.

[0362] FIG. 1. Schematic representation of autocrine/paracrine receptor-ligand interactions that inhibit T cell activation and induce immune tolerance and T cell exhaustion. Autocrine/paracrine TGF□ induces expression of FOXP3, the signature transcription factor of the Treg lineage. FOXP3 induces expression of CTLA-4, a T cell inhibitory receptor which restrains T cell costimulation by interfering with B7-CD28 interaction. Tregs express Galectin-9, a ligand that engages TIM-3 and triggers exhaustion or apoptosis of effector T cells by the TIM-3/CEACAM-1 co-inhibitory axis. Engagement of PD-1 by PD-L1 promotes TGF□-induced expression of FOXP3 to induce and maintain Tregs, and cooperates with TIM-3/CEACAM-1 signaling to induce T cell exhaustion and death.

[0363] FIG. 2. α-PDL1-TIM3ecd and α-PD1-TIM3ecd counteract immune tolerance and T cell exhaustion by simultaneously interrupting PD-L1/PD-1 signaling and the TIM-3/CEACAM-1 co-inhibitory axis.

[0364] (A) Schematic representation of the structure and targets of a-PDL1-TIM3ecd and a-PD1-TIM3ecd. a-PD1-TIM3ecd comprises: (i) Heavy chain of a human a-PD-1 antibody fused at the C-terminus to a ligand-binding IgV ectodomain sequence of TIM-3 via a flexible linker peptide, (GGGGS)3 (SEQ ID NO: 53) and (ii) Light chain of a human α-PD-1 antibody (SEQ ID NO: 187). a-PDL1-TIM3ecd comprises: (i) Heavy chain of a human a-PD-L1 antibody fused at the C-terminus to a ligand-binding IgV ectodomain sequence of TIM-3 via a flexible linker peptide, (GGGGS)3 (SEQ ID NO: 51) and (ii) Light chain of a human α-PD-L1 antibody (SEQ ID NO: 185). (B) Schematic representation of the targets and mechanisms by which a-PDL1-TIM3ecd and a-PD1-TIM3ecd disrupt autocrine/paracrine receptor-ligand interactions that inhibit T cell activation and induce T cell exhaustion. Autocrine/paracrine TGFβ induces expression of FOXP3, the signature transcription factor of the Treg lineage. FOXP3 induces expression of CTLA-4, a T cell inhibitory receptor which restrains T cell costimulation by interfering with B7-CD28 interaction. Tregs express Galectin-9, a ligand that engages TIM-3 and triggers exhaustion or apoptosis of effector T cells by the TIM-3/CEACAM-1 co-inhibitory axis. Engagement of PD-1 by PD-L1 promotes TGFβ-induced expression of FOXP3 to induce and maintain Tregs, and cooperates with TIM-3/CEACAM-1 signaling to induce T cell exhaustion and death. α-PDL1-TIM3ecd and α-PD1-TIM3ecd disable PD-1/PD-L1 signaling and simultaneously disrupt cis/trans interactions involving the TIM-3 and CEACAM-1 co-inhibitory pathways.(C) Schematic representation of the mechanism by which α-PDL1-TIM3ecd and α-PD1-TIM3ecd simultaneously counteract multipronged suppression of T cells via the PD-L1/PD-1 and TIM-3/CEACAM-1 co-inhibitory axes. α-PDL1-TIM3ecd and α-PD1-TIM3ecd interrupt PD-L1/PD-1 interaction and simultaneously disrupt: (i) heterophilic TIM-3/CEACAM-1 interactions (cis CEACAM-1/TIM-3 heterodimerization; trans CEACAM1 heterodimerization with TIM-3); (ii) homophilic CEACAM-1/CEACAM-1 interactions (cis CEACAM-1 dimerization; trans CEACAM1-induced cis CEACAM-1 dimerization).

[0365] FIG. 3. Characterization and target-binding ability of α-PDL1-TIM3ecd and a-PD1-TIM3ecd. (A) SDS-PAGE under reducing (R) and non-reducing (NR) conditions was used to compare the full-length (FL), heavy chain (HC) and light chain (LC) of α-PD1-TIM3ecd and α-PD1 antibody (nivolumab). SDS-PAGE confirmed the expected higher molecular weight of the heavy chain of a-PD1-TIM3ecd compared to the heavy chain of a-PD1 antibody (Top panel). SDS-PAGE under reducing (R) and non-reducing (NR) conditions was used to compare the full-length (FL), heavy chain (HC) and light chain (LC) of a-PDL1-TIM3ecd and a-PDL1 antibody (atezolizumab). SDS-PAGE confirmed the expected higher molecular weight of the heavy chain of a-PDL1-TIM3ecd compared to the heavy chain of a-PDL1 antibody (Bottom panel). (B) ELISA showing binding of a-PD1-TIM3 to rhPD-1 (Top panel): Biotinylated rhPD-1 (0-250 ng/ml) was added to plates coated with a-PD1-TIM3ecd (1 μg/ml). ELISA showing binding of a-PDL1-TIM3 to rhPD-L1 (Bottom panel): Biotinylated rhPD-L1 (0-250 ng/ml) was added to plates coated with either a-PDL1-TIM3 (1 μg/ml) or a-PDL1 antibody (atezolizumab)(positive control). (C) a-PD1-TIM3ecd and a-PDL1-TIM3ecd bind recombinant human (rh) CEACAM-1 in vitro. rhCEACAM-1 (5 μg) was incubated (overnight, 4oC) in the presence or absence of a-PD1-TIM3ecd, a-PDL1-TIM3ecd, a-gp120-TIM3ecd, α-PD-L1 mAb (atezolizumab), or α-PD1 mAb (nivolumab)(10 μg each), followed by incubation with protein A-agarose beads (10 μl) for 6 h, and then immunoprecipitated with protein A-agarose beads. The precipitated complexes were washed with immunoprecipitation buffer, re-suspended in NuPAGE sample buffer with reducing agent, boiled, resolved on a Bis-Tris Criterion XT Gel system and transferred to a PVDF membrane. Membranes were immunoblotted with primary antibodies [CEACAM1 (D1P4T); TIM3 (D5D5R™)] overnight, washed, incubated with secondary antibodies and visualized by Amersham ECL Western Blotting Detection Reagents. Immunoblot analyses detected rhCEACAM-1 in α-PD1-TIM3ecd, α-PDL1-TIM3ecd, and a-gp120-TIM3ecd protein A-pulled down immunoprecipitates, but not in immunoprecipitates of α-PD-L1 mAb (atezolizumab), or α-PD1 mAb (nivolumab). (D) a-PD1-TIM3ecd and a-PDL1-TIM3ecd bind CEACAM-1 on co-stimulated human T cells. Human PBMC were co-stimulated with anti-CD3/anti-CD28 beads in the presence of a-PD1-TIM3 ecd, α-PDL1-TIM3ecd, α-PD-L1 mAb (atezolizumab), or α-PD1 mAb (nivolumab) for 6 d. Cell lysates were immunoprecipitated with protein A-agarose beads (10 □l) for 6 h. The precipitated complexes were washed with immunoprecipitation buffer, re-suspended in NuPAGE sample buffer with reducing agent, boiled, resolved on a Bis-Tris Criterion XT Gel system and transferred to a PVDF membrane. Membranes were immunoblotted with primary antibodies [CEACAM1 (D1P4T); TIM3 (D5D5R™)] overnight, washed, incubated with secondary antibodies and visualized by Amersham ECL Western Blotting Detection Reagents. Immunoblot analyses with the CEACAM-1 antibody detected CEACAM-1 in protein A-immunoprecipitates of a-PD1-TIM3ecd and a-PDL1-TIM3ecd treated cell lysates, but not in immunoprecipitates of a-PD-L1 mAb (atezolizumab), or a-PD1 mAb (nivolumab) treated cell lysates. Immunoblot analyses with the TIM-3ecd antibody detected the heavy chain of a-PD1-TIM3ecd or a-PDL1-TIM3ecd in protein A-immunoprecipitates of α-PD1-TIM3ecd and a-PDL1-TIM3ecd treated cell lysates, but not in immunoprecipitates of a-PD-L1 mAb (atezolizumab), or a-PD1 mAb (nivolumab) treated cell lysates.

[0366] FIG. 4. a-PD1-TIM3ecd and a-PDL1-TIM3ecd are significantly more effective than a-PD-1 mAb or a-PD-L1 mAb in promoting IFN-γ expression and counteracting exhaustion of co-stimulated T cells. (A) Human PBMCs were stimulated with anti-CD3/anti-CD28 beads (5 μg/ml) and rhIL-2, in the presence or absence of α-PD1-TIM3ecd, a-PDL1-TIM3ecd, a-PD-L1 mAb (atezolizumab), a-PD1 mAb (nivolumab), a-human TIM3 Ab (F38-2E2), or the combination of a-PD1 mAb and a-TIM3 Ab (5 μg/ml each) for 3-9d. Interferon-γ (IFN-γ) in cell supernatants at each indicated time (3d, 6d, and 9d) was quantified by ELISA (Data represent mean±SEM of 3 in vitro replicates for each group). ELISA demonstrated that a-PDL1-TIM3ecd and a-PD1-TIM3ecd are significantly more effective in promoting IFNγ expression and counteracting exhaustion of co-stimulated T cells in vitro compared to either a-PDL1 (atezolizumab), a-PD-1 (pembrolizumab), a-TIM3 Ab, or even the combination of a-PD1 mAb and a-TIM3 Ab. (B) Human PBMCs were stimulated with anti-CD3/anti-CD28 beads (5 μl/ml ) and rhIL-2, in the presence or absence of a-PD1-TIM3ecd, a-PDL1-TIM3ecd, a-PD-L1 mAb (atezolizumab), a-PD1 mAb (nivolumab), a-human TIM3 Ab (F38-2E2), or the combination of a-PD1 mAb and a-TIM3 Ab (5 μg/ml each) for 16 h or 40 h, and IFN-γ in cell supernatants was quantified by ELISA (mean±SEM of 3 in vitro replicates/group). a-PDL1-TIM3ecd is significantly more effective in promoting IFNγ expression by co-stimulated T cells in vitro compared to either a-PDL1 (atezolizumab), a-PD-1 (pembrolizumab), a-TIM3 Ab, or even the combination of a-PD1 mAb and a-TIM3 Ab [data represent the fold-change in IFNγ expression in each antibody-treated group compared to co-stimulation without antibody)]. (C) a-PD1-TIM3ecd counteracts TGFβ mediated suppression of IFNγ expression in co-stimulated T cells. Human PBMCs were stimulated with anti-CD3/anti-CD28 and rhIL-2 in the presence or absence of rhTGFβ1 (5 ng/ml) with or without either α-PDL1-TIM3 (5 μg/ml) for 16h or 40 h, and Interferon-γ (IFN-γ) in cell supernatants was quantified by ELISA (Data represent mean±SEM of 3 in vitro replicates for each group).

[0367] FIG. 5. a-PD1-TIM3ecd inhibits tumor growth more effectively than a-PD-1, a-TIM-3 or the combination of a-TIM-3 and a-PD1. (A) NSG mice (NOD/Shi-scid IL-2rgnull)(4-8 weeks) were reconstituted with adoptive transfer of 3×106 human peripheral blood mononuclear cells (PBMCs) [that were costimulated with anti-CD3/anti-CD28 beads (5□l/ml) and rhIL-2 in the presence of the following specified treatments for 8 days (5 □g/ml each): a-PD1-TIM3ecd, a-PD1 mAb (nivolumab), a-human TIM3 Ab (F38-2E2), combination of a-PD1 mAb and a-TIM3 Ab, or vehicle alone. Reconstituted mice were injected subcutaneously with 2×106 D-MUT1 human colorectal cancer cells, and each group was treated in vivo (5 mg/kg i.p. every 5 days) with the same treatment used for in vitro treatment of PBMCs used for adoptive transfer, as indicated: a-PD1-TIM3ecd; a-PD1 (nivolumab); a-TIM-3 (F38-2E2); combination of a-PD1 and a-TIM-3; vehicle alone (untreated control) [≥5 mice/group]. Tumor size was measured blinded to the treatment group and tumor volume was calculated using the formula (length x width x height). In vivo tumor growth curves (mean+SEM) are shown. p values were derived using unpaired, two-sided t-test. The p value (p<0.02, Student's unpaired t-test) denotes significant difference between a-PD1-TIM3ecd and each other treatment group. (B) Immune deficient NSG mice (NOD/Shi-scid IL-2rgnull)(4-8 weeks) were irradiated at 200 cGy, and immune reconstituted by adoptive transfer of HLA A2-matched human CD34+.hematopoietic cells. Reconstituted humanized mice were injected subcutaneously with human Triple Negative Breast Cancer (TNBC) HLA A2+ tumor cells (MDA-MB-231-Luc)(1×106 in matrigel; mammary fat pad). At 3d following tumor inoculation, mice were randomized and treated with either vehicle alone (untreated control) or the following antibodies (5 mg/kg i.p. weekly): a-PD1-TIM3ecd, a-PD1 mAb (nivolumab), a-human TIM3 Ab (F38-2E2), combination of a-PD1 mAb and a-TIM3 Ab [≥5 mice/group]. Tumor size was measured blinded to the treatment group and tumor volume was calculated using the formula (length×width×height). In vivo tumor growth curves (mean+SEM) are shown. p values were derived using unpaired, two-sided t-test. The p value (p<0.02, Student's unpaired t-test) denotes significant difference between α-PD1-TIM3ecd and each other treatment group.

[0368] FIG. 6. a-PDL1-TIM3ecd inhibits tumor growth more effectively than a-PD-L1, a-PD-1, a-TIM-3 or the combination of a-PD-L1 and a-TIM-3. Immune deficient NSG mice (NOD/Shi-scid IL-2rgnull)(4-8 weeks) were irradiated at 200 cGy, and immune reconstituted by adoptive transfer of HLA A2 human CD34+.hematopoietic cells. Reconstituted humanized mice were injected subcutaneously with human Triple Negative Breast Cancer (TNBC) HLA A2+ tumor cells (MDA-MB-231-Luc)(1×106 in matrigel; mammary fat pad). At 3d following tumor inoculation, mice were randomized and treated with either vehicle alone (untreated control) or the following antibodies (5 mg/kg i.p. weekly): α-PDL1-TIM3ecd, a-PD1 mAb (atezolizumab), a-PD1 mAb (pembrolizumab), a-human TIM3 Ab (F38-2E2), combination of α-PD-L1 mAb and a-TIM3 Ab [≥5 mice/group]. (A) Tumor size was measured blinded to the treatment group and tumor volume was calculated using the formula (length×width×height). In vivo tumor growth curves (mean+SEM) are shown. p values were derived using unpaired, two-sided t-test. The p value (p<0.02, Student's unpaired t-test) denotes significant difference between a-PDL1-TIM3ecd and each other treatment group. (B) Bioluminescence assay of primary tumors in untreated controls or the indicated treatment groups at 7 and 27 d after tumor cell inoculation. (C) Quantification of T cell density in tumors: Tumor volume and flow cytometry was used to assess the absolute number of CD4+ and CD8+ T cells per mm3 of tumor.

[0369] FIG. 7. Schematic design of multifunctional antibody-ligand traps of this invention comprising a targeting antibody that binds a target epitope, ligand-binding IgV ectodomain sequence of TIM-3 (TIM-3ecd), and ligand-binding ectodomain sequence of PD-1 (PD-1ecd). The multifunctional antibody-ligand traps can bind a target epitope (via the antigen-binding CDR), bind PD-1 ligands, PD-L1 and PD-L2 (via the PD-1ecd) and TIM-3 ligands (CEACAM-1)(via the TIM-3ecd). (A) Schematic design of multifunctional antibody-ligand traps of this invention comprising a targeting antibody, wherein the heavy chain of the antibody is fused at the C-terminus to a ligand-binding IgV ectodomain sequence of TIM-3 (TIM-3ecd: SEQ ID NO: 2) via a linker, and the light chain of the antibody is fused at the C-terminus to a ligand-binding ectodomain sequence of PD-1 (PD-1ecd: SEQ ID NO: 7) via a linker. In one aspect, the linker is a peptide, (GGGGS)n (SEQ ID NO: 3). (B) Schematic design of multifunctional antibody-ligand traps of this invention comprising a targeting antibody, wherein the heavy chain of the antibody is fused at the C-terminus to a ligand-binding ectodomain sequence of PD-1 (PD-1ecd: SEQ ID NO: 7) via a linker peptide, and the light chain of the antibody is fused at the C-terminus to a ligand-binding ectodomain sequence of TIM-3 (TIM-3ecd: SEQ ID NO: 2) via a linker peptide. In one aspect, the linker is a peptide, (GGGGS)n (SEQ ID NO: 3). In various embodiments, the targeting antibody of the multifunctional antibody-ligand traps of this invention binds one of the following molecules: Cytotoxic T lymphocyte associated antigen-4 (CTLA-4, CD152), B7-H3 (CD276), V domain Ig suppressor of T cell activation (VISTA), VSIG8, B and T lymphocyte attenuator (BTLA), Herpesvirus Entry Mediator (HVEM), CD160, T cell Ig and ITM domain (TIGIT), CD226, CD96, Lymphocyte activation gene-3 (LAG-3), transforming growth factor β (TGF-β), transforming growth factor β receptor (TGFβR), 4-1BB (CD137), Inducible T-Cell Costimulator (ICOS), OX-40 (CD134), glucocorticoid-induced TNFR-related protein (GITR), IL6R, IL23R, IL17R, IL-6, IL-23, IL-17, CD39, CD73, CCR4, CCR5, CXCR4, IL12R, CD4, CD25, CD3, epidermal growth factor receptor (EGFR, EGFR1, ErbB-1, HER1), ErbB-2 (HER2/neu), ErbB-3/HER3, ErbB-4/HER4, EGFR ligand, Vascular endothelial growth factor (VEGF), VEGFR (VEGFR1, VEGFR2), RANK ligand (RANKL), RANK, gp120.

[0370] FIG. 8. Schematic design of multifunctional antibody-ligand traps of this invention comprising a targeting antibody that binds CTLA-4, ligand-binding IgV ectodomain sequence of TIM-3 (TIM-3ecd), and ligand-binding ectodomain sequence of PD-1 (PD-1ecd). The multifunctional antibody-ligand traps can bind CTLA-4 (via the antigen-binding CDR), bind PD-1 ligands, PD-L1 and PD-L2 (via the PD-1ecd) and TIM-3 ligands (CEACAM-1)(via the TIM-3ecd). (A) Schematic design of multifunctional antibody-ligand traps of this invention comprising a targeting antibody that binds CTLA-4, wherein the heavy chain of the antibody is fused at the C-terminus to a ligand-binding IgV ectodomain sequence of TIM-3 via a linker peptide (SEQ ID NO: 207), and the light chain of the antibody is fused at the C-terminus to a ligand-binding ectodomain sequence of PD-1 via a linker peptide (SEQ ID NO: 208). In one aspect, the linker is a peptide, (GGGGS)n (SEQ ID NO: 3).(B) Schematic design of multifunctional antibody-ligand traps of this invention comprising a targeting antibody that binds CTLA-4, wherein the heavy chain of the antibody is fused at the C-terminus to a ligand-binding ectodomain sequence of PD-1 SEQ ID NO:205) via a linker peptide, and the light chain of the antibody is fused at the C-terminus to a ligand-binding ectodomain sequence of TIM-3 (SEQ ID NO: 206) via a linker peptide. In one aspect, the linker is a peptide, (GGGGS)n (SEQ ID NO: 3).

[0371] FIG. 9. Schematic design of multifunctional antibody-ligand traps of this invention comprising a targeting antibody that binds a target epitope, ligand-binding IgV ectodomain sequence of TIM-3 (TIM-3ecd), and ligand-binding ectodomain sequence of TGFβRII (TGFβRIIecd). The multifunctional antibody-ligand traps can bind a target epitope (via the antigen-binding CDR), bind TGFβ (via the TGFβRIIecd) and TIM-3 ligands (CEACAM-1)(via the TIM-3ecd). In one embodiment, the multifunctional antibody-ligand traps of this invention comprise a targeting antibody, wherein the heavy chain of the antibody is fused at the C-terminus to a ligand-binding ectodomain sequence of TGFβRII (TGF□RIIecd) via a linker peptide (SEQ ID NO: 6), and the light chain of the antibody is fused at the C-terminus to a ligand-binding IgV ectodomain sequence of TIM-3 (TIM-3ecd: SEQ ID NO: 2) via a linker peptide. In one aspect, the linker is a peptide, (GGGGS)n (SEQ ID NO: 3). In various embodiments, the targeting antibody of the multifunctional antibody-ligand traps of this invention binds one of the following molecules: Cytotoxic T lymphocyte associated antigen-4 (CTLA-4, CD152), Programmed Death-1 protein (PD-1), Programmed death ligand (PD-L1), Programmed death ligand (PD-L2), B7-H3 (CD276) ,V domain Ig suppressor of T cell activation (VISTA), VSIG8, B and T lymphocyte attenuator (BTLA), Herpesvirus Entry Mediator (HVEM), CD160, T cell Ig and ITM domain (TIGIT), CD226, CD96, Lymphocyte activation gene-3 (LAG-3) ,4-1BB (CD137), Inducible T-Cell Costimulator (ICOS), OX-40 (CD134), glucocorticoid-induced TNFR-related protein (GITR), IL6R, IL23R, IL17R, IL-6, IL-23, IL-17, CD39, CD73, CCR4, CCR5, CXCR4, IL12R, CD4, CD25, CD3, epidermal growth factor receptor (EGFR, EGFR1, ErbB-1, HER1), ErbB-2 (HER2/neu), ErbB-3/HER3, ErbB-4/HER4, EGFR ligand, Vascular endothelial growth factor (VEGF), VEGFR (VEGFR1, VEGFR2), RANK ligand (RANKL), RANK.

[0372] FIG. 10. Schematic design of multifunctional antibody-ligand traps of this invention comprising a targeting antibody that binds a T cell inhibitory receptor or ligand, ligand-binding IgV ectodomain sequence of TIM-3 (TIM-3ecd), and ligand-binding ectodomain sequence of TGFβRII (TGFβRIIecd). (A) Schematic design of multifunctional antibody-ligand traps of this invention comprising a targeting antibody that binds PD-1, ligand-binding IgV ectodomain sequence of TIM-3 (TIM-3ecd), and ligand-binding ectodomain sequence of TGFβRII (TGFβRIIecd). In one embodiment, the multifunctional antibody-ligand traps of this invention comprise a targeting antibody that binds PD-1, wherein the heavy chain of the antibody is fused at the C-terminus to a ligand-binding ectodomain sequence of TGFβRII (TGFβRIIecd)(SEQ ID NO: 6) via a linker peptide, and the light chain of the antibody is fused at the C-terminus to a ligand-binding IgV ectodomain sequence of TIM-3 (TIM-3ecd: SEQ ID NO: 2) via a linker peptide. In one aspect, the linker is a peptide, (GGGGS)n (SEQ ID NO: 3). In one example, multifunctional antibody-ligand trap comprises a heavy chain corresponding to SEQ ID NO: 273 and a light chain corresponding to SEQ ID NO: 274. In another example, multifunctional antibody-ligand trap comprises a heavy chain corresponding to SEQ ID NO: 277 and a light chain corresponding to SEQ ID NO: 278. (B) Schematic design of multifunctional antibody-ligand traps of this invention comprising a targeting antibody that binds PD-L1, ligand-binding IgV ectodomain sequence of TIM-3 (TIM-3ecd), and ligand-binding ectodomain sequence of TGFβRII (TGFβRIIecd). In one embodiment, the multifunctional antibody-ligand traps of this invention comprise a targeting antibody that binds PD-L1, wherein the heavy chain of the antibody is fused at the C-terminus to a ligand-binding ectodomain sequence of TGFβRII (TGFβRIIecd)(SEQ ID NO: 6) via a linker peptide, and the light chain of the antibody is fused at the C-terminus to a ligand-binding IgV ectodomain sequence of TIM-3 (TIM-3ecd: SEQ ID NO: 2) via a linker peptide. In one aspect, the linker is a peptide, (GGGGS)n (SEQ ID NO: 3). In one example, multifunctional antibody-ligand trap comprises a heavy chain corresponding to SEQ ID NO: 285 and a light chain corresponding to SEQ ID NO: 285 . In another example, multifunctional antibody-ligand trap comprises a heavy chain corresponding to SEQ ID NO: 281 and a light chain corresponding to SEQ ID NO: 282. (C) Schematic design of multifunctional antibody-ligand traps of this invention comprising a targeting antibody that binds CTLA-4, ligand-binding IgV ectodomain sequence of TIM-3 (TIM-3ecd), and ligand-binding ectodomain sequence of TGFβRII (TGFβRIIecd). In one embodiment, the multifunctional antibody-ligand traps of this invention comprise a targeting antibody that binds CTLA-4, wherein the heavy chain of the antibody is fused at the C-terminus to a ligand-binding ectodomain sequence of TGFβRII (TGFβRIIecd)(SEQ ID NO: 6) via a linker peptide, and the light chain of the antibody is fused at the C-terminus to a ligand-binding IgV ectodomain sequence of TIM-3 (TIM-3ecd: SEQ ID NO: 2) via a linker peptide. In one aspect, the linker is a peptide, (GGGGS)n (SEQ ID NO: 3). In one example, multifunctional antibody-ligand trap comprises a heavy chain corresponding to SEQ ID NO: 203 and a light chain corresponding to SEQ ID NO: 204.

[0373] FIG. 11. Schematic design of multifunctional antibody-ligand traps of this invention comprising a targeting antibody that binds a target epitope, ligand-binding ectodomain sequence of PD-1 (PD-1ecd), and ligand-binding ectodomain sequence of TGFβRII (TGFβRIIecd). The multifunctional antibody-ligand traps can bind a target epitope (via the antigen-binding CDR), bind TGFβ (via the TGFβRIIecd) and PD-1 ligands, PD-L1 and PD-L2 (via the PD-1ecd). In one embodiment, the multifunctional antibody-ligand traps of this invention comprise a targeting antibody, wherein the heavy chain of the antibody is fused at the C-terminus to a ligand-binding ectodomain sequence of TGFβRII (TGFβRIIecd)(SEQ ID NO: 6) via a linker peptide, and the light chain of the antibody is fused at the C-terminus to ligand-binding ectodomain sequence of PD-1 (PD1ecd: SEQ ID NO: 7) via a linker peptide. In one aspect, the linker is a peptide, (GGGGS)n (SEQ ID NO: 3). In various embodiments, the targeting antibody of the multifunctional antibody-ligand traps of this invention binds one of the following molecules: Cytotoxic T lymphocyte associated antigen-4 (CTLA-4, CD152), T-cell immunoglobulin and mucin-domain containing-3 (TIM-3), CEACAM-1, Carcinoembryonic Antigen (CEA),V domain Ig suppressor of T cell activation (VISTA), VSIG8, B and T lymphocyte attenuator (BTLA), Herpesvirus Entry Mediator (HVEM), CD160, T cell Ig and ITM domain (TIGIT), CD226, CD96, Lymphocyte activation gene-3 (LAG-3), 4-1BB (CD137), Inducible T-Cell Costimulator (ICOS), OX-40 (CD134), glucocorticoid-induced TNFR-related protein (GITR), IL6R, IL23R, IL17R, IL-6, IL-23, IL-17, CD39, CD73, CCR4, CCR5, CXCR4, IL12R, CD4, CD25, CD3, epidermal growth factor receptor (EGFR, EGFR1, ErbB-1, HER1), ErbB-2 (HER2/neu), ErbB-3/HER3, ErbB-4/HER4, EGFR ligand, Vascular endothelial growth factor (VEGF), VEGFR, RANK ligand (RANKL), RANK.

[0374] FIG. 12. In various embodiments, multifunctional antibody-ligand traps of this invention comprises a targeting antibody that binds a T cell inhibitory receptor or ligand, ligand-binding ectodomain sequence of PD-1 (PD-1ecd), and ligand-binding ectodomain sequence of TGFβRII (TGFβRIIecd). In one embodiment, the multifunctional antibody-ligand traps of this invention comprise a targeting antibody that binds CTLA-4, wherein the heavy chain of the antibody is fused at the C-terminus to a ligand-binding ectodomain sequence of TGFβRII (TGFβRIIecd)(SEQ ID NO: 203) via a linker peptide, and the light chain of the antibody is fused at the C-terminus to a ligand-binding ectodomain sequence of PD-1 (PD-1ecd: SEQ ID NO: 202) via a linker peptide. In one aspect, the linker is a peptide, (GGGGS)n (SEQ ID NO: 3). In one example, multifunctional antibody-ligand trap comprises a heavy chain corresponding to SEQ ID NO: 202 and a light chain corresponding to SEQ ID NO: 203.

### Design and Characterization of Antibody-Ligand Traps (Y-Traps)

[0375] The cDNA for the antibody heavy chain and the cDNA for the antibody light chain were gene synthesized and subsequently cloned into separate plasmids (pEvi3; evitria AG, Switzerland) under the control of a mammalian promoter and polyadenylation signal. Plasmid DNA was amplified in E. coli and DNA was purified using anion exchange kits for low endotoxin plasmid DNA preparation. DNA concentration was determined by measuring the absorption at a wavelength of 260 nm. Correctness of the sequences was verified with Sanger sequencing (with up to two sequencing reactions per plasmid depending on the size of the cDNA.) The plasmid DNAs for heavy and light chain were subsequently co-transfected into suspension-adapted CHO K1 cells (originally received from ATCC and adapted to serum-free growth in suspension culture at evitria). The seed was grown in eviGrow medium, a chemically defined, animal-component free, serum-free medium. Cells were transfected with eviFect (evitria AG, Switzerland). and the CHO cells were cultured in eviMake2 (evitria AG, Switzerland), a serum-free, animal-component free medium. Production was terminated once viability reached 75%, which occurred at day 8 after transfection. Supernatant was harvested by centrifugation and subsequent filtration (0.2 um filter). The antibody was purified using MabSelect™ Sure™. Protein identification of the purified antibody from CHO-K1 cell supernatants was performed by liquid chromatography FTFT tandem mass spectrometry (LCMS/MS) to confirm the amino acid sequence of the heavy chain (HC) and light chain (LC) (e.g. FIG. 2A. a-PDL1-TIM3ecd and a-PD1-TIM3ecd). SDS-PAGE under reducing and non-reducing conditions was used to compare the full-length, heavy chain and light chain of antibody-ligand traps and their corresponding parent antibodies [e.g. FIG. 3A. a-PDL1-TIM3ecd, a-PD1-TIM3ecd, a-PDL1 mAb (atezolizumab) and a-PD1 mAb (nivolumab).

[0376] Target binding ability of antibody-ligand traps.

[0377] (i) Binding to PD-1 ligand (ELISA): Biotinylated rhPD-L1 (0-250 ng/ml) was added to ELISA plates coated with either antibody-ligand trap (1 μg/ml) or α-PDL1 antibody (atezolizumab)(positive control)(1 μg/ml), and detected by HRP-Avidin (R&D systems). Each experiment was performed twice, with triplicate wells for each indicated condition. ELISA showing the ability of α-PDL1-TIM3 (1 μg/ml) or α-PDL1 antibody (atezolizumab)(positive control) (1 μg/ml) to bind rhPD-L1 is shown in FIG. 3A. This assay is also used to evaluate the binding of any antibody-ligand traps comprising a ligand-binding sequence of PD-1 ectodomain (PD-1ecd) to biotinylated rhPD-L1 and rh PD-L2.

[0378] (ii) Binding to PD-1 (ELISA): Biotinylated rhPD-1 (0-250 ng/ml) was added to plates coated with either antibody-ligand trap (1 μg/ml) or α-PD1 antibody (nivolumab or pembrolizumab)(positive control) (1 μg/ml), and detected by HRP-Avidin (R&D systems). Each experiment was performed twice, with triplicate wells for each indicated condition. ELISA showing binding of α-PD1-TIM3ecd to rhPD-1 is shown in FIG. 3A. This assay is also used to evaluate the binding of any antibody-ligand trap comprising a PD-1 targeting antibody.

[0379] (iii) Binding to TIM-3 ligand/co-inhibitory receptor (CEACAM-1) in vitro. rhCEACAM-1 (5 μg) was incubated (overnight, 4° C.) in the presence or absence of antibody-ligand trap comprising a ligand-binding sequence of TIM-3 ectodomain (TIM3ecd)(antibody-TIM3ecd) or α-gp120-TIM3ecd (positive control)(10 μg each), followed by incubation with protein A-agarose beads (10 μl) for 6 h, and then immunoprecipitated with protein A-agarose beads. The precipitated complexes were washed with immunoprecipitation buffer, re-suspended in NuPAGE sample buffer with reducing agent, boiled, resolved on a Bis-Tris Criterion XT Gel system and transferred to a PVDF membrane. Membranes were immunoblotted with primary antibodies [CEACAM1 (D1P4T); TIM3 (D5D5R™)] overnight, washed, incubated with secondary antibodies and visualized by Amersham ECL Western Blotting Detection Reagents. Binding of α-PD1-TIM3ecd and α-PDL1-TIM3ecd to recombinant human (rh) CEACAM-1 in vitro is shown in FIG. 2C. Immunoblot analyses detected rhCEACAM-1 in α-PD1-TIM3ecd, α-PDL1-TIM3ecd, and α-gp120-TIM3ecd protein A-pulled down immunoprecipitates, but not in immunoprecipitates of α-PD-L1 mAb (atezolizumab), or α-PD1 mAb (nivolumab)(FIG. 2C). This assay is also used to evaluate the binding of any antibody-ligand trap comprising a ligand-binding sequence of a ligand-binding sequence of TIM-3 ectodomain(TIM-3ecd) to rh CEACAM-1.

[0380] (iv) Binding to TIM-3 ligand/co-inhibitory receptor (CEACAM-1) on co-stimulated human T cells. Human PBMC were co-stimulated with anti-CD3/anti-CD28 beads in ImmunoCult medium (STEMCELL technologies) in the presence or absence of antibody-ligand trap comprising a ligand-binding sequence of TIM3ecd (antibody-TIM3ecd) or α-gp120-TIM3ecd (positive control)(10 μg each) for 6 d. Cell lysates were immunoprecipitated with protein A-agarose beads (10 μl) for 6 h. The precipitated complexes were washed with immunoprecipitation buffer, re-suspended in NuPAGE sample buffer with reducing agent, boiled, resolved on a Bis-Tris Criterion XT Gel system and transferred to a PVDF membrane. Membranes were immunoblotted with primary antibodies [CEACAM1 (D1P4T); TIM3 (D5D5R™)] overnight, washed, incubated with secondary antibodies and visualized by Amersham ECL Western Blotting Detection Reagents. Binding of α-PD1-TIM3ecd and α-PDL1-TIM3ecd to CEACAM-1 on co-stimulated human T cells is shown in FIG. 2D. Immunoblot analyses with the CEACAM-1 antibody detected CEACAM-1 in protein A-immunoprecipitates of α-PD1-TIM3ecd and α-PDL1-TIM3ecd treated cell lysates, but not in immunoprecipitates of α-PD-L1 mAb (atezolizumab), or α-PD1 mAb (nivolumab) treated cell lysates. Immunoblot analyses with the TIM-3ecd antibody detected the heavy chain of α-PD1-TIM3ecd or α-PDL1-TIM3ecd in protein A-immunoprecipitates of α-PD1-TIM3ecd and α-PDL1-TIM3ecd treated cell lysates, but not in immunoprecipitates of α-PD-L1 mAb (atezolizumab), or α-PD1 mAb (nivolumab) treated cell lysates. This assay is also used to evaluate the binding of any antibody-ligand trap comprising a ligand-binding sequence of TIM-3 ectodomain (TIM-3ecd) to CEACAM-1 on co-stimulated human T cells.

[0381] (v) Binding to TGFβ (ELISA). The ability of antibody-ligand traps comprising a ligand-binding sequence of TGFβRII ectodomain (TGFβRII)(antibody-TGFβRIIecd) to bind TGFβ was evaluated by ELISA, wherein recombinant human TGFβ (rhTGFβ1; 0-2000 pg/ml) was added to plates coated with antibody-TGFβRII (1 βg/ml), which was detected by biotinylated anti-TGFβ1 and HRP-Avidin (R&D systems). Plates coated with non-specific IgG-TGFβRII and rhTGFβRII-Fc served as positive controls to analyze the binding ability of the test samples to TGFβ.

[0382] Standard ELISA is used to assess the multifunctional ability of any antibody-ligand trap to bind the primary antibody target and also capture the ligands targeted by the fused cognate receptor ectodomain sequence (Receptor ecd). In each case, ELISA plates will be coated with antibody-ligand trap (1 μg/ml), followed by addition of biotinylated-target molecule (0-1000 ng/ml), and detection with HRP-Avidin (R&D systems).

[0383] Ability of Antibody-Ligand Traps to Promote IFNγ Expression and Counteract Exhaustion of Co-Stimulated T Cells:

[0384] (A) Human PBMCs were stimulated with anti-CD3/anti-CD28 beads (5 μl/ml) and rhIL-2, in the presence or absence of α-PD1-TIM3ecd, α-PDL1-TIM3ecd, α-PD-L1 mAb (atezolizumab), α-PD1 mAb (nivolumab), a-human TIM3 Ab (F38-2E2), or the combination of α-PD1 mAb and α-TIM3 Ab (5 □g/ml each) for 3-9 d. Interferon-γ (IFN-γ) in cell supernatants at each indicated time (3 d, 6 d, and 9 d) was quantified by ELISA (Data represent mean±SEM of 3 in vitro replicates for each group). ELISA demonstrated that α-PDL1-TIM3ecd and α-PD1-TIM3ecd are significantly more effective in promoting IFNγ expression and counteracting exhaustion of co-stimulated T cells in vitro compared to either α-PDL1 (atezolizumab), α-PD-1 (pembrolizumab), α-TIM3 Ab, or even the combination of α-PD1 mAb and α-TIM3 Ab.

[0385] (B) Human PBMCs were stimulated with anti-CD3/anti-CD28 beads (5 μl/ml) and rhIL-2, in the presence or absence of α-PD1-TIM3ecd, α-PDL1-TIM3ecd, α-PD-L1 mAb (atezolizumab), α-PD1 mAb (nivolumab), α-human TIM3 Ab (F38-2E2), or the combination of α-PD1 mAb and α-TIM3 Ab (5 μg/ml each) for 16 h or 40 h, and IFN-γ in cell supernatants was quantified by ELISA (mean±SEM of 3 in vitro replicates/group). α-PDL1-TIM3ecd is significantly more effective in promoting IFNγ expression by co-stimulated T cells in vitro compared to either α-PDL1 (atezolizumab), α-PD-1 (pembrolizumab), α-TIM3 Ab, or even the combination of α-PD1 mAb and α-TIM3 Ab [data represent the fold-change in IFNγ expression in each antibody-treated group compared to co-stimulation without antibody].

[0386] (C) α-PD1-TIM3ecd counteracts TGFβ mediated suppression of IFNγ expression in co-stimulated T cells. Human PBMCs were stimulated with anti-CD3/anti-CD28 and rhIL-2 in the presence or absence of rhTGFβ1 (5 ng/ml) with or without either α-PDL1-TIM3 (5 μg/ml) for 16 h or 40 h, and Interferon-γ (IFN-γ) in cell supernatants was quantified by ELISA (Data represent mean±SEM of 3 in vitro replicates for each group).

[0387] Treatment of humanized mice bearing human tumor-xenografts. Immune deficient NSG mice (NOD/Shi-scid IL-2re^{null})(4-8 week old) were reconstituted with adoptive transfer of human peripheral blood mononuclear cells (PBMCs) or human bone marrow CD34⁺ cells from a normal donor. Humanized mice were inoculated with human tumor cells . Following tumor inoculation, mice were allocated to groups using blinded block randomization and treated (5 mg/kg i.p. every 5 d) with either vehicle alone (untreated control) or the following antibodies: α-PDL1-TIM3ecd; α-PDL1-TIM3ecd, α-PDL1 (atezolizumab); α-TIM-3; α-PD-1 (pembrolizumab); combination of α-PDL1 and α-TIM-3; combination of α-PDL1 and α-TIM-3.

[0388] Bioluminescent imaging of primary tumors. Tumor burden in mice bearing MDA-MB-231-Luc was assessed by visualization of in vivo luciferase activity using a Xenogen IVIS Spectrum system. Images were acquired at 10 min post injection of 50 mg/kg i.p. dose of luciferin. To detect metastases, the lower portion of each animal was shielded before re-imaging to minimize bioluminescence from the primary tumor. Lungs were harvested and imaged ex vivo to confirm in vivo observations. Photon flux was used to quantify the differences in tumor burden between treatment groups.

[0389] Evaluation of therapeutic efficacy: Tumor size was measured weekly for 6 weeks [length, width, height], and tumor volume calculated. Tumor growth inhibition (% TGI) values was calculated using initial (i) and final (f) tumor volumes for the treatment (T) and untreated control (C) groups by the formula: % TGI=[1−(Tf−Ti)/(Cf−Ci)]×100.

[0390] Immunophenotype Analysis of T Cells—Flow Cytometry:

[0391] Tumors, draining lymph node (DLN), and bone marrow (BM) were harvested from mice in untreated control and treatment groups (at the end of therapy) for immunophenotype analysis of T cells, as follows: (a) Regulatory T cells: Tregs in tumor-infiltrating, DLN, or BM T cells isolated from mice in each group were measured by flow cytometry. Cells were stained extracellularly with anti-human CD4-PE, anti-human CD25-PE-CY™5, and anti-human CD127-FITC (BD Biosciences). The cells were then be permeabilized and stained intracellularly with anti-human FOXP3-APC or the corresponding isotype control IgG1-APC (eBioscience), and then analyzed by flow cytometry to quantify Tregs (CD4⁺CD25⁺CD127^{low}FOXP3⁺ cells). (b) Memory T cells: CD8+ and CD4+ T cells with a central memory (CD45RO+CD62L+) or effector memory (CD45RO+CD62L−) immunophenotype were measured in BM, DLN, and tumor-infiltrating T cells isolated from mice in each group. Cells were stained with anti-human CD4-PE, anti-human CD8-PE-CY™7, anti-human CD45RO-APC, and anti-human CD62L-FITC (BD Biosciences), and analyzed by flow cytometry to quantify T cells with a central memory phenotype (CD45RO^{high}CD62L^{high}). (c) Tumor-reactive CD4+ and CD8+ T cells expressing IFNγ: To evaluate tumor-specific IFNγ expression in T cells, DLN or BM cells were plated (2×10⁵ cells/well) in the presence of tumor cell lysate, non-specific control peptide, or medium. Cells were cultured for 72 h followed by incubation with Golgi stop for 4 h. Cells were stained extracellularly with anti-CD4-FITC and anti-CD8-APC antibodies, permeabilized, stained intracellularly with anti-IFNystained extracellularly with anti-CD4-FITC and anti-CD8-APC antibodies, permea(d) T cell density in primary tumors: Tumor volume was calculated, and flow cytometry was used to calculate the absolute number of CD4+ and CD8+ T cells per mm³ of tumor.

[0392] Evaluation of Immuno-Inhibitory Receptors/Ligands in the TME:

[0393] Tumors from mice in untreated control and treatment groups (at the end of treatment) were analyzed for expression of the following immunoreceptors/ligands that inhibit T cell activation or induce T cell exhaustion: (a) Expression of PD-1 and PD-L1 on tumor-infiltrating T cells, DLN T cells, and tumor cells: Cells were stained with anti-human CD4-APC, CD8-FITC, and either anti-human PD-1-PE or PD-L1-PE, and the mean percentage of T cells expressing PD-1 or PD-L1 and tumor cells expressing PD-L1 were quantified by flow cytometry. The level of PD-L1 expression in tumors was also assessed by IHC. (b) Expression of TIM-3 and TIM-3 ligands (Galectin-9 and CEACAM-1) on tumor-infiltrating T cells, DLN T cells and tumor cells: Cells were stained with anti-human CD4-APC, CD8-FITC, and either anti-human TIM-3-PE, Galectin-9-PE, or CEACAM-1-PE (BD Biosciences), and the mean percentage of T cells expressing TIM-3 and tumor cells expressing Galectin-9 or CEACAM-1 were quantified by flow cytometry. (c) TGFβ signaling: Immunoblot analyses of T cells—Smad-2/3/4 expression and activity (phosphorylation).

[0394] Assessment of signatures of immune dysfunction in TILs (elevated Tregs and/or T cell exhaustion). RNA is extracted from tumors (from all treatment and control groups) and RNA-Seq was performed (including quality check, library preparation, sequencing and data processing). Mathematical deconvolution is applied to bulk RNA-Seq data using the cell type-specific reference gene expression profiles (RGEPs) from Cancer single-cell RNA sequencing data. Deconvolution is performed using a collection of differentially expressed genes that facilitate annotation of the four T-cell subtypes as naive-like, regulatory, cytotoxic, and exhausted, and the estimated proportion of each subtype is calculated for each sample¹⁰⁵. This approach is used to evaluate a relative index of four distinct T cells subtypes (CD4⁺T_{H}1 cells, CD4⁺Tregs, CD8⁺ cytotoxic T cells, and CD8⁺ exhausted T cells) based on the differential expression of T cell markers. The following ratios serve as numerical surrogates of the relative infiltration of tumors with different subsets of CD4⁺ or CD8⁺ TILs: (i) Treg/T_{H}1 and (ii) exhausted CD8+ T cells/cytotoxic CD8+ T cells. Simultaneously, expression of specific markers that characterize T_{H}1 cells (TBET, IFNγ cells (TBET, IFNed CD8+ T cells/cytotoxic CD8+ T cells. Simultaneously, expression of specific are measured in parallel multiplex RT-PCR reactions (QuantiTect, Qiagen) to calculate the following ratios: (i) Treg/T_{H}1=FOXP3/TBET or CTLA-4/IFN□; (ii) exhausted T cells/cytotoxic T cells=(TIM3+PD-1)/GZMB. RNA-Seq data is also be used to assess expression of immuno-inhibitory ligands.

[0395] Although the invention has been described with reference to the above example, it will be understood that modifications and variations are encompassed within the spirit and scope of the invention. Accordingly, the invention is limited only by the following claims.

What is claimed is:

1. A molecule comprising a targeting moiety and one or more immunomodulatory moieties, wherein:
(a) the targeting moiety comprises a polypeptide which specifically binds a component of a tumor cell, tumor microenvironment, tumor associated growth factor or receptor, tumor associated cytokine or receptor, tumor associated T lymphocyte, T cell co-stimulatory or inhibitory molecule, immune cell, pathogen, or pathogen-associated cell, and
(b) the immunomodulatory moiety comprises the extracellular domain (ECD) sequence or ligand binding fragment thereof of a T lymphocyte immunoreceptor, T cell inhibitory receptor (TCIR), T-cell co-inhibitory molecule, T-cell co-stimulatory molecule, B lymphocyte receptor, DC receptor, NK cell receptor, cytokine receptor, growth factor receptor, chemokine receptor, or tumor cell receptor.

2. The molecule of claim 1, wherein the targeting moiety polypeptide comprises an antigen-binding domain of an immunoglobulin, antibody, bispecific or multispecific antibody, antibody fragment, single chain variable fragment (scFv), bivalent or multivalent scFv, or a Fc-containing polypeptide.

3. The molecule of claim 1, wherein the targeting moiety polypeptide is an antibody that specifically binds a T cell inhibitory receptor (TCIR), a T cell inhibitory receptor ligand (TCIR ligand), a T-cell co-inhibitory molecule, or a T cell co-stimulatory molecule; or comprises a ligand-binding sequence from the extracellular domain (ECD) of a receptor or ligand.

4. The molecule of claim 2, wherein the targeting moiety is an antibody and the immunomodulatory moiety is fused to the C terminus of the heavy chain of the antibody.

5. The molecule of claim 2, wherein the targeting moiety is an antibody and the immunomodulatory moiety is fused to the C terminus of the light chain of the antibody.

6. The molecule of claim 1, wherein the targeting moiety polypeptide specifically binds one or more of Cytotoxic T lymphocyte associated antigen-4 (CTLA-4, CD152), Programmed Death-1 protein (PD-1), Programmed death ligand-1 (PD-L1), Programmed death ligand (PD-L2), B7-H3 (CD276), T-cell immunoglobulin and mucin-domain containing-3 (TIM-3), Carcinoembryonic antigen-related cell adhesion molecule 1 (CEACAM-1), Carcinoembryonic Antigen (CEA), V domain Ig suppressor of T cell activation (VISTA), V-set and immunoglobulin domain containing 8 (VSIG8), B and T lymphocyte attenuator (BTLA), Herpesvirus Entry Mediator (HVEM), CD160, T cell Ig and ITM domain (TIGIT), CD226, CD96, Lymphocyte activation gene-3 (LAG-3), transforming growth factor β (TGF-β), transforming growth factor β receptor (TGFβR), Receptor Activator of Nuclear Factor η B (RANK), RANK ligand (RANKL), 4-1BB (CD137), Inducible T-Cell Costimulator (ICOS), OX-40 (CD134), glucocorticoid-induced TNFR-related protein (GITR), CD27, IL6R, IL23R, IL17R, IL-6, IL-23, IL-17,CD39, CD40, CD40L, CD47, CD73,CCR4, CCR5, CXCR4, IL12R, CD4, IL-2R, CD25, CD3, gp120, Epidermal growth factor receptor (EGFR, EGFR1, ErbB-1, HER1), ErbB-2 (HER2/neu), ErbB-3/HER3, ErbB-4/HER4, Epidermal growth factor (EGF), Transforming growth factor α (TGFα), Vascular endothelial growth factor (VEGF), Vascular endothelial growth factor receptor-1 (VEGFR-1), VEGFR-2 or VEGFR-3.

7. The molecule of claim 1, wherein the immunomodulatory moiety comprises the extracellular ligand-binding sequence or ligand binding fragment thereof of transforming growth factor β receptor II (TGFβRII), programmed death 1 protein (PD-1), T cell immunoglobulin and mucin domain containing 3 (TIM-3), B- and T-lymphocyte attenuator (BTLA), CD160, CD226, T cell Ig and ITM domain (TIGIT), CD96, CD44, Colony stimulating factor 1 receptor (CSF1R), CCR4, Killer-cell immunoglobulin-like receptor (KIR), Vascular endothelial growth factor receptor (VEGFR), Receptor Activator of Nuclear Factor η B (RANK), V-set and immunoglobulin domain containing 8 (VSIG8), LIGHT (TNFSF14), Leukocyte Associated Immunoglobulin-like Receptor 1 (LAIR1), or V domain Ig suppressor of T cell activation (VISTA).

8. The molecule of claim 1, further comprising a linker.

9. The molecule of claim 8, wherein the linker fuses the targeting moiety and the immunomodulatory moiety.

10. The molecule of claim 8, wherein the linker comprises the sequence of SEQ ID NOs: 3, 4, or 5.

11. The molecule of claim 1, wherein the immunomodulatory moiety comprises the ECD or a ligand binding fragment thereof of TIM-3.

12. The molecule of claim 11, wherein the ligand binding fragment comprises the CEACAM-1 binding fragment of TIM-3.

13. The molecule of claim 11, wherein the immunomodulatory moiety comprises the sequence of SEQ ID NO: 2.

14. The molecule of claim 1 wherein the targeting moiety is a polypeptide that binds to PD-1, PD-L1, CTLA4, LAG3, VISTA, TIGIT, BTLA, CCR4, 41BB, OX40, GITR, VEGF, RANKL, TGF-β, IL6R, EGFR, HER2/neu, or gp120 and the immunomodulatory moiety is the ECD or a ligand binding fragment thereof of TIM-3.

15. The molecule of claim 1 wherein the immunomodulatory moiety comprises the ECD or a ligand binding fragment thereof of CD226.

16. The molecule of claim 15 where in the immunomodulatory moiety comprises the sequence of SEQ ID NO: 9.

17. The molecule of claim 15 wherein the targeting moiety comprises a polypeptide that binds to TIM-3, BTLA, CCR4, CTLA4, LAG3, PD-1, PD-L1, TIGIT, VISTA, 41BB, OX40, GITR, RANKL, TGF-β, IL-6R, EGFR, HER2/neu, VEGF, or gp120.

18. The molecule of claim 1 wherein the immunomodulatory moiety is the ECD or a ligand binding fragment thereof of CD44.

19. The molecule of claim 15 where in the immunomodulatory moiety comprises the sequence of SEQ ID NO: 36.

20. The molecule of claim 1 wherein the targeting moiety comprises a polypeptide that binds to TIM-3, BTLA, CCR4, CTLA4, LAG3, PD-1, PD-L1, TIGIT, VISTA, 41BB, OX40, GITR, RANKL, TGF-β, IL-6R, EGFR, HER2/neu, VEGF, or gp120 and the immunomodulatory moiety is the ECD or a ligand binding fragment thereof of CD44.

21. The molecule of claim 1 wherein the immunomodulatory moiety comprises the ECD or a ligand binding fragment thereof of VSIG8.

22. The molecule of claim 15 where in the immunomodulatory moiety comprises the sequence of SEQ ID NO: 55.

23. The molecule of claim 1 wherein the targeting moiety comprises a polypeptide that binds to TIM-3, BTLA, CCR4, CTLA4, LAG3, PD-1, PD-L1, TIGIT, VISTA, 41BB, OX40, GITR, RANKL, TGF-β, IL-6R, EGFR, HER2/neu, VEGF, or gp120 and the immunomodulatory moiety is the ECD or a ligand binding fragment thereof of VSIG8.

24. The molecule of claim 1, wherein the molecule comprises the sequence of SEQ ID NOs: 10 and 145; 11 and 146; 12 and 147; 13 and 148; 14 and 149; 15 and 150; 16 and 151; 17 and 152; 18 and 153; 19 and 154, 20 and 155; 21 and 156; 22 and 157; 23 and 158; 24 and 159; 25 and 160; 26 and 161; 27 and 162; 28 and 163; 29 and 164; 30 and 165; 31 and 166; 32 and 167; 33 and 168; 34 and 169; 35 and 170; 37 and 171; 38 and 172; 39 and 173; 40 and 174; 41 and 175; 42 and 176; 43 and 177; 44 and 178; 45 and 179; 46 and 180; 47 and 181; 48 and 182; 49 and 183; 50 and 184; 51 and 185; 52 and 186; 53 and 187; 58 and 188; 59 and 189; 60 and 61; 62 and 63; 64 and 65; 66 and 67; 68 and 69; 70 and 71; 72 and 73; 74 and 75; 76 and 77; 78 and 79; 80 and 81; 82 and 83; 84 and 85; 86 and 87; 88 and 89; 90 and 91; 92 and 93; 94 and 95; 96 and 97; 98 and 99; 100 and 101; 102 and 103; 104 and 105; 106 and 107; 108 and 109; 110 and 111; 112 and 113; 114 and 115; 116 and 117; 118 and 119; 120 and 121; 122 and 123; 124 and 125; 126 and 127; 128 and 129; 130 and 131; 132 and 133; 134 and 135; 136 and 137; 138 and 139; 140 and 141; 142 and 143; 192 and 193; 209 and 210; 211 and 212; 221 and 222; 223 and 224; 233 and 234; 235 and 236; 245 and 246; 247 and 248; 257 and 258; 259 and 260; 269 and 270; 271 and 272; 275 and 276; 279 and 280; 283 and 284; 287 and 288; 290 and 291; 292 and 293; 294 and 295; 296 and 297 or 298 and 299.

25. The molecule of claim 14, wherein the targeting moiety comprises a polypeptide that binds PD-1 or PD-L1 and the immunomodulatory moiety is the ECD or ligand binding fragment thereof of TIM-3.

26. The molecule of claim 25, wherein the targeting moiety comprises an antibody and the immunomodulatory moiety is fused to either the heavy chain or to the light chain of the targeting moiety.

27. The molecule of claim 26, wherein the molecule comprises the sequence of SEQ ID NOs: 51 and 185.

28. The molecule of claim 26, wherein the molecule comprises the sequence of SEQ ID NOs: 52 and 186.

29. The molecule of claim 26, wherein the molecule comprises the sequence of SEQ ID NOs: 53 and 187.

30. The molecule of claim 26, wherein the molecule comprises the sequence of SEQ ID NOs: 192 and 193.

31. The molecule of claim 14, wherein the targeting moiety comprises a polypeptide that binds CTLA-4 and the immunomodulatory moiety is the ECD or ligand binding fragment thereof of TIM-3.

32. The molecule of claim 31, wherein the molecule comprises the sequence of SEQ ID NOs: 50 and 184.

33. The molecule of claim 14, wherein the targeting moiety comprises a polypeptide that binds LAG-3 and the immunomodulatory moiety is the ECD or ligand binding fragment thereof of TIM-3.

34. The molecule of claim 33, wherein the molecule comprises the sequence of SEQ ID NOs: 26 and 161.

35. The molecule of claim 14, wherein the targeting moiety comprises a polypeptide that binds VISTA and the immunomodulatory moiety is the ECD or ligand binding fragment thereof of TIM-3.

36. The molecule of claim 35, wherein the molecule comprises the sequence of SEQ ID NOs: 12 and 147.

37. The molecule of claim 14, wherein the targeting moiety comprises a polypeptide that binds TIGIT and the immunomodulatory moiety is the ECD or ligand binding fragment thereof of TIM-3.

38. The molecule of claim 37, wherein the molecule comprises the sequence of SEQ ID NOs: 17 and 152.

39. The molecule of claim 14, wherein the targeting moiety comprises a polypeptide that binds BTLA and the immunomodulatory moiety is the ECD or ligand binding fragment thereof of TIM-3.

40. The molecule of claim 39, wherein the molecule comprises the sequence of SEQ ID NOs: 22 and 157.

41. The molecule of claim 14, wherein the targeting moiety comprises a polypeptide that binds CCR-4 and the immunomodulatory moiety is the ECD or ligand binding fragment thereof of TIM-3.

42. The molecule of claim 41, wherein the molecule comprises the sequence of SEQ ID NOs: 31 and 166.

43. The molecule of claim 14, wherein the targeting moiety comprises a polypeptide that binds 4-1BB and the immunomodulatory moiety is the ECD or ligand binding fragment thereof of TIM-3.

44. The molecule of claim 43, wherein the molecule comprises the sequence of SEQ ID NOs: 116 and 117.

45. The molecule of claim 14, wherein the targeting moiety comprises a polypeptide that binds VEGF and the immunomodulatory moiety is the ECD or ligand binding fragment thereof of TIM-3.

46. The molecule of claim 45, wherein the molecule comprises the sequence of SEQ ID NOs: 88 and 89.

47. The molecule of claim 1, wherein the immunomodulatory moiety comprises the ECD or ligand binding fragment thereof of BTLA or LIGHT.

48. The molecule of claim 47, wherein the ligand binding fragment comprises an Herpesvirus entry mediator (HVEM, CD 270) binding fragment.

49. The molecule of claim 48, wherein the immunomodulatory moiety comprises the sequence of SEQ ID NO: 8 or 302.

50. The molecule of claim 1, wherein the immunomodulatory moiety comprises the ECD or ligand binding fragment thereof of CD226.

51. The molecule of claim 50, wherein the ligand binding fragment comprises a CD155 or CD112 binding fragment.

52. The molecule of claim 51, wherein the ligand binding fragment comprises the sequence of SEQ ID NO: 9.

53. The molecule of claim 1, wherein the immunomodulatory moiety comprises the ECD or ligand binding fragment thereof of VSIG8.

54. The molecule of claim 53, wherein the ligand binding fragment comprises a VISTA binding fragment.

55. The molecule of claim 52, wherein the ligand binding fragment comprises the sequence of SEQ ID NO: 55.

56. The molecule of claim 1, wherein the immunomodulatory moiety comprises the ECD or ligand binding fragment thereof of CCR4.

57. The molecule of claim 56, wherein the ligand binding fragment comprises a CCL22 binding fragment.

58. A molecule comprising a targeting moiety, a first immunomodulatory moiety and a second immunomodulatory moiety, wherein:
(a) the targeting moiety comprises a polypeptide that specifically binds one or more of Cytotoxic T lymphocyte associated antigen-4 (CTLA-4, CD152), Programmed Death-1 protein (PD-1), Programmed death ligand-1 (PD-L1), Programmed death ligand (PD-L2), B7-H3 (CD276), T-cell immunoglobulin and mucin-domain containing-3 (TIM-3), Carcinoembryonic antigen-related cell adhesion molecule 1 (CEACAM-1), Carcinoembryonic Antigen (CEA), V domain Ig suppressor of T cell activation (VISTA), V-set and immunoglobulin domain containing 8 (VSIG8), B and T lymphocyte attenuator (BTLA), Herpesvirus Entry Mediator (HVEM), CD160, T cell Ig and ITM domain (TIGIT), CD226, CD96, Lymphocyte activation gene-3 (LAG-3), transforming growth factor β (TGF-β), transforming growth factor β receptor (TGFβR), Receptor Activator of Nuclear Factor η B (RANK), RANK ligand (RANKL), 4-1BB (CD137), Inducible T-Cell Costimulator (ICOS), OX-40 (CD134), glucocorticoid-induced TNFR-related protein (GITR), CD27, IL6R, IL23R, IL17R, IL-6, IL-23, IL-17,CD39, CD40, CD4OL, CD47, CD73, CCR4, CCRS, CXCR4, IL12R, CD4, IL-2R, CD25, CD3, gp120, Epidermal growth factor receptor (EGFR, EGFR1, ErbB-1, HER1), ErbB-2 (HER2/neu), ErbB-3/HER3, ErbB-4/HER4, Epidermal growth factor (EGF), Transforming growth factor α (TGFα), Vascular endothelial growth factor (VEGF), Vascular endothelial growth factor receptor-1 (VEGFR-1), VEGFR-2 or VEGFR-3.
(b) the first immunomodulatory moiety comprises the extracellular ligand-binding sequence or ligand binding fragment thereof of transforming growth factor β receptor II (TGFβRII), programmed death 1 protein (PD-1), T cell immunoglobulin and mucin domain containing 3 (TIM-3), B- and T-lymphocyte attenuator (BTLA), CD226, T cell Ig and ITIM domain (TIGIT), CD44, Colony stimulating factor 1 receptor (CSF1R), CCR4, Killer-cell immunoglobulin-like receptor (KIR), Vascular endothelial growth factor receptor (VEGFR), Receptor Activator of Nuclear Factor η B (RANK), V-set and immunoglobulin domain containing 8 (VSIG8), LIGHT (TNFSF14), Leukocyte Associated Immunoglobulin-like Receptor 1 (LAIR1), or V domain Ig suppressor of T cell activation (VISTA); and
(c) the second immunomodulatory moiety comprises the extracellular ligand-binding sequence or ligand binding fragment thereof of transforming growth factor β receptor II (TGFβRII), programmed death 1 protein (PD-1), T cell immunoglobulin and mucin domain containing 3 (TIM-3), B- and T-lymphocyte attenuator (BTLA), CD226, T cell Ig and ITM domain (TIGIT), CD44, Colony stimulating factor 1 receptor (CSF1R), CCR4, Killer-cell immunoglobulin-like receptor (KIR), Vascular endothelial growth factor receptor (VEGFR), Receptor Activator of Nuclear Factor η B (RANK), V-set and immunoglobulin domain containing 8 (VSIG8), LIGHT (TNFSF14), Leukocyte Associated Immunoglobulin-like Receptor 1 (LAIR1), or V domain Ig suppressor of T cell activation (VISTA).

59. The molecule of claim 58, wherein the molecule comprises the sequence of SEQ ID NOs: 201 and 202; 203 and 204; 205 and 206; 207 and 208; 213 and 214; 215 and 216; 217 and 218; 219 and 220; 225 and 226; 227 and 228; 229 and 230; 231 and 232; 237 and 238; 239 and 240; 241 and 242 ; 243 and 244; 249 and 250; 251 and 252; 253 and 254; 255 and 256; 261 and 262; 263 and 264; 265 and 266; 267 and 268; 273 and 274; 277 and 278; 281 and 282; 285 and 286.

60. The molecule of claim 58, wherein the targeting moiety polypeptide comprises an antigen-binding domain of an immunoglobulin, antibody, bispecific or multispecific antibody, antibody fragment, single chain variable fragment (scFv), bivalent or multivalent scFv, a ligand-binding sequence from the extracellular domain (ECD) of a receptor, or Fc-containing polypeptide.

61. The molecule of claim 58, wherein the targeting moiety polypeptide is an antibody.

62. The molecule of claim 61, wherein the first immunomodulatory moiety is attached to the C-terminus of a heavy chain or a light chain of the antibody.

63. The molecule of claim 61, wherein the second immunomodulatory moiety is attached to the C-terminus of a heavy chain or a light chain of the antibody.

64. The molecule of claim 58, wherein the second immunomodulatory moiety is attached to the first immunomodulatory moiety.

65. The molecule of any of claims 62-63 wherein the first and second immunomodulatory moiety is attached to the heavy chain or the light chain of the antibody with a linker.

66. The molecule of claim 64, wherein the second immunomodulatory moiety is attached to the first immunomodulatory moiety with a linker.

67. The molecule of claim 65 or 66, wherein the linker comprises the sequence of SEQ ID NOs: 3, 4 or 5.

68. The molecule of claims 62 and 63, wherein the first immunomodulatory moiety is attached to the heavy chain of the antibody and the second immunomodulatory moiety is attached to the light chain of the antibody.

69. The molecule of claim 68, wherein the first immunomodulatory moiety comprises the ECD or ligand binding fragment thereof of TIM3.

70. The molecule of claim 68, wherein the second immunomodulatory moiety comprises the ECD or ligand binding fragment thereof of PD-1.

71. The molecule of claim 65, wherein the first immunomodulatory moiety comprises the ECD or ligand binding fragment thereof of TGFβRII and the second immunomodulatory moiety comprises the ECD or ligand binding fragment thereof of TIM-3.

72. The molecule of claim 71, wherein the first immunomodulatory moiety comprises the ECD or ligand binding fragment thereof of PD-1 and the second immunomodulatory moiety comprises the ECD or ligand binding fragment thereof of TIM-3.

73. The molecule of claims 62 and 63, wherein the first immunomodulatory moiety comprises the ECD or ligand binding fragment thereof of TGFβRII and the second immunomodulatory moiety comprises the ECD or ligand binding fragment thereof of PD-1.

74. The molecule of claim 61, wherein the antibody specifically binds IL6R, CTLA-4, EGFR, HER2, or VEGF.

75. The molecule of claim 65, wherein the targeting moiety is an antibody that binds CTLA-4, the first immunomodulatory moiety is the ECD or ligand-binding fragment thereof of TGFβRII, and the second immunomodulatory moiety is the ECD or ligand-binding fragment thereof of TIM-3.

76. The molecule of claim 75, wherein the molecule comprises the sequences of SEQ ID NOs: 203 and 204.

77. The molecule of claim 65, wherein the targeting moiety is an antibody that binds CTLA-4, the first immunomodulatory moiety is the ECD or ligand-binding fragment thereof of TGFβRII, and the second immunomodulatory moiety is the ECD or ligand-binding fragment thereof of PD-1.

78. The molecule of claim 77, wherein the molecule comprises the sequences of SEQ ID NOs: 201 and 202.

79. The molecule of claim 65, wherein the targeting moiety is an antibody that binds CTLA-4, the first immunomodulatory moiety is the ECD or ligand-binding fragment thereof of TIM-3, and the second immunomodulatory moiety is the ECD or ligand-binding fragment thereof of PD-1.

80. The molecule of claim 65, wherein the targeting moiety is an antibody that binds CTLA-4, the first immunomodulatory moiety is the ECD or ligand-binding fragment thereof of PD-1 and the second immunomodulatory moiety is the ECD or ligand-binding fragment thereof of TIM-3.

81. The molecule of claim 79 or 80, wherein the molecule comprises the sequences of SEQ ID NOs: 205 and 206 or 207 and 208.

82. The molecule of claim 65, wherein the targeting moiety is an antibody that binds PD-1 or PD-L1, the first immunomodulatory moiety is the ECD or ligand-binding fragment thereof of TGFβRII, and the second immunomodulatory moiety is the ECD or ligand-binding fragment thereof of TIM-3.

83. The molecule of claim 82, wherein the molecule comprises the sequences of SEQ ID NOs: 273 and 274; 277 and 278; 285 and 286; or 281 and 282.

84. The molecule of claim 65, wherein the targeting moiety is an antibody that binds IL-6R, the first immunomodulatory moiety is the ECD or ligand-binding fragment thereof of TGFβRII, and the second immunomodulatory moiety is the ECD or ligand-binding fragment thereof of TIM-3.

85. The molecule of claim 84, wherein the molecule comprises the sequences of SEQ ID NOs: 215 and 216.

86. A fusion protein comprising the extracellular binding domain (ECD) or ligand binding fragment thereof of TIM-3 and the ECD or ligand binding fragment thereof of TGFRβII, PD-1, BTLA, LIGHT, CD226, LAIR1, or VSIG8.

87. The fusion protein of claim 86, wherein the fusion protein comprises the ECD or ligand binding fragment thereof of TIM-3 and the ECD or ligand binding fragment thereof of TGFβRII.

88. The fusion protein of claim 87, wherein the fusion protein comprises the sequence of SEQ ID NO: 190.

89. The fusion protein of claim 86, wherein the fusion protein comprises the ECD or ligand binding fragment thereof of TIM-3 and the ECD or ligand binding fragment thereof of PD-1.

90. The fusion protein of claim 89, wherein the fusion protein comprises the sequence of SEQ ID NOs: 195, 196 or 197.

91. The fusion protein of any of claims 86-90 further comprising an Fc.

92. A composition comprising the molecule or fusion protein of any of claims 1-90 and a pharmaceutically acceptable carrier.

93. A method of treating a subject having cancer or an infectious disease comprising administering to the subject the molecule or fusion protein of any of claims 1-90 or the composition of claim 91.

94. The method of claim 93, where in the molecule or composition is administered by intracutaneous, subcutaneous, intravenous, intraperitoneal, intraarterial, intrathecal, intracapsular, intraorbital, intracardiac, intradermal, transdermal, transtracheal, subcuticular, intraarticulare, subcapsular, subarachnoid, intraspinal and intrasternal , oral, sublingual buccal, rectal, vaginal, nasal or ocular administrations, by infusion, inhalation, or nebulization or by parenteral administration.

95. The method of claim 93, wherein the cancer is selected from the group consisting of Lung cancer, Breast cancer, Colorectal cancer, Prostate cancer, Stomach cancer, Liver cancer, cervical cancer, Esophageal cancer, Bladder cancer, Non-Hodgkin lymphoma, Leukemia, Pancreatic cancer, Kidney cancer, endometrial cancer, Head and neck cancer, Lip cancer, oral cancer, Thyroid cancer, Brain cancer, Ovary cancer, Melanoma, Gallbladder cancer, Laryngeal cancer, Multiple myeloma, Nasopharyngeal cancer, Hodgkin lymphoma, Testis cancer and Kaposi sarcoma.

96. The method of claim 93, wherein the infectious disease is selected from the group consisting of Influenza, Tuberculosis, HIV/AIDS, Malaria, Hepatitis, Herpes Simplex Virus (HSV), and Human Papilloma Virus (HPV).

97. The method of claim 93, wherein a chemotherapeutic agent, immunotherapeutic agent or antibiotic is administered simultaneously with, before or following the administration of the molecule, fusion protein or composition.

The application's sequence listing, which the Patent Office published only in electronic form, follows.

SEQUENCE LISTING (307 sequences)

SEQ ID NO: 1 - protein, 301 aa, Homo sapiens
  misc_feature: Human TIM-3/HAVCR2
MFSHLPFDCVLLLLLLLLTRSSEVEYRAEVGQNAYLPCFYTPAAPGNLVPVCWGKGACPVFECGNVVLRTDERDVNYWTSRYWLNGDFRKGDVSLTIENVTLADSGIYCCRIQIPGIMNDEKFNLKLVIKPAKVTPAPTRQRDFTAAFPRMLTTRGHGPAETQTLGSLPDINLTQISTLANELRDSRLANDLRDSGATIRIGIYIGAGICAGLALALIFGALIFKWYSHSKEKIQNLSLISLANLPPSGLANAVAEGIRSEENIYTIEENVYEVEEPNEYYCYVSSRQQPSQPLGCRFAMP

SEQ ID NO: 2 - protein, 181 aa, Homo sapiens
  misc_feature: Human TIM-3/HAVCR2 Ser22 - Gly202
SEVEYRAEVGQNAYLPCFYTPAAPGNLVPVCWGKGACPVFECGNVVLRTDERDVNYWTSRYWLNGDFRKGDVSLTIENVTLADSGIYCCRIQIPGIMNDEKFNLKLVIKPAKVTPAPTRQRDFTAAFPRMLTTRGHGPAETQTLGSLPDINLTQISTLANELRDSRLANDLRDSGATIRIG

SEQ ID NO: 3 - protein, 5 aa, Homo sapiens
  misc_feature: Primer
GGGGS

SEQ ID NO: 4 - protein, 6 aa, Homo sapiens
  misc_feature: Primer
IEGRMD

SEQ ID NO: 5 - protein, 3 aa, Homo sapiens
  misc_feature: Primer
STG

SEQ ID NO: 6 - protein, 137 aa, Homo sapiens
  misc_feature: Extracellular sequence TGF Beta  Receptor II (TGF Beta RII ECD)
TIPPHVQKSVNNDMIVTDNNGAVKFPQLCKFCDVRFSTCDNQKSCMSNCSITSICEKPQEVCVAVWRKNDENITLETVCHDPKLPYHDFILEDAASPKCIMKEKKKPGETFFMCSCSSDECNDNIIFSEEYNTSNPD

SEQ ID NO: 7 - protein, 150 aa, Homo sapiens [sequence omitted]

SEQ ID NO: 8 - protein, 127 aa, Homo sapiens
  misc_feature: Extracellular sequence of BTLA
  misc_feature: Lys31 - Arg157 of UniProt Q7Z6A9
KESCDVQLYIKRQSEHSILAGDPFELECPVKYCANRPHVTWCKLNGTTCVKLEDRQTSWKEEKNISFFILHFEPVLPNDNGSYRCSANFQSNLIESHSTTLYVTDVKSASERPSKDEMASRPWLLYR

SEQ ID NO: 9 - protein, 236 aa, Homo sapiens [sequence omitted]

SEQ ID NO: 10 - protein, 602 aa, Homo sapiens
  misc_feature: Anti-VISTA antibody - TGF Beta RII ECD fusion protein
QVQLVQSGAEVKKPGSSVKVSCKASGGTFSSYAISWVRQAPGQGLEWMGGIIPIPGTANYAQKFQGRVTITADESTSTAYMELSSLRSEDTAVYYCARSSYGWSYEFDYWGQGTLVTVSSASTKGPSVFPLAPSSKSTSGGTAALGCLVKDYFPEPVTVSWNSGALTSGVHTFPAVLQSSGLYSLSSVVTVPSSSLGTQTYICNVNHKPSNTKVDKKVEPKSCDKTHTCPPCPAPELLGGPSVFLFPPKPKDTLMISRTPEVTCVVVDVSHEDPEVKFNWYVDGVEVHNAKTKPREEQYASTYRVVSVLTVLHQDWLNGKEYKCKVSNKALPAPIEKTISKAKGQPREPQVYTLPPSREEMTKNQVSLTCLVKGFYPSDIAVEWESNGQPENNYKTTPPVLDSDGSFFLYSKLTVDKSRWQQGNVFSCSVMHEALHNHYTQKSLSLSPGKGGGGSGGGGSGGGGSTIPPHVQKSVNNDMIVTDNNGAVKFPQLCKFCDVRFSTCDNQKSCMSNCSITSICEKPQEVCVAVWRKNDENITLETVCHDPKLPYHDFILEDAASPKCIMKEKKKPGETFFMCSCSSDECNDNIIFSEEYNTSNPD

SEQ ID NO: 11 - protein, 615 aa, Homo sapiens
  misc_feature: Anti-VISTA antibody - PD-1 ECD fusion protein
  misc_feature: Heavy chain = Anti-VISTA heavy chain + PD-1 ECD fusion
QVQLVQSGAEVKKPGSSVKVSCKASGGTFSSYAISWVRQAPGQGLEWMGGIIPIPGTANYAQKFQGRVTITADESTSTAYMELSSLRSEDTAVYYCARSSYGWSYEFDYWGQGTLVTVSSASTKGPSVFPLAPSSKSTSGGTAALGCLVKDYFPEPVTVSWNSGALTSGVHTFPAVLQSSGLYSLSSVVTVPSSSLGTQTYICNVNHKPSNTKVDKKVEPKSCDKTHTCPPCPAPELLGGPSVFLFPPKPKDTLMISRTPEVTCVVVDVSHEDPEVKFNWYVDGVEVHNAKTKPREEQYASTYRVVSVLTVLHQDWLNGKEYKCKVSNKALPAPIEKTISKAKGQPREPQVYTLPPSREEMTKNQVSLTCLVKGFYPSDIAVEWESNGQPENNYKTTPPVLDSDGSFFLYSKLTVDKSRWQQGNVFSCSVMHEALHNHYTQKSLSLSPGKGGGGSGGGGSGGGGSPGWFLDSPDRPWNPPTFSPALLVVTEGDNATFTCSFSNTSESFVLNWYRMSPSNQTDKLAAFPEDRSQPGQDCRFRVTQLPNGRDFHMSVVRARRNDSGTYLCGAISLAPKAQIKESLRAELRVTERRAEVPTAHPSPSPRPAGQFQTLV

SEQ ID NO: 12 - protein, 646 aa, Homo sapiens
  misc_feature: Anti-VISTA antibody - TIM-3 ECD fusion protein
  misc_feature: Heavy chain = Anti-VISTA heavy chain + TIM-3 ECD fusion
QVQLVQSGAEVKKPGSSVKVSCKASGGTFSSYAISWVRQAPGQGLEWMGGIIPIPGTANYAQKFQGRVTITADESTSTAYMELSSLRSEDTAVYYCARSSYGWSYEFDYWGQGTLVTVSSASTKGPSVFPLAPSSKSTSGGTAALGCLVKDYFPEPVTVSWNSGALTSGVHTFPAVLQSSGLYSLSSVVTVPSSSLGTQTYICNVNHKPSNTKVDKKVEPKSCDKTHTCPPCPAPELLGGPSVFLFPPKPKDTLMISRTPEVTCVVVDVSHEDPEVKFNWYVDGVEVHNAKTKPREEQYASTYRVVSVLTVLHQDWLNGKEYKCKVSNKALPAPIEKTISKAKGQPREPQVYTLPPSREEMTKNQVSLTCLVKGFYPSDIAVEWESNGQPENNYKTTPPVLDSDGSFFLYSKLTVDKSRWQQGNVFSCSVMHEALHNHYTQKSLSLSPGKGGGGSGGGGSGGGGSSEVEYRAEVGQNAYLPCFYTPAAPGNLVPVCWGKGACPVFECGNVVLRTDERDVNYWTSRYWLNGDFRKGDVSLTIENVTLADSGIYCCRIQIPGIMNDEKFNLKLVIKPAKVTPAPTRQRDFTAAFPRMLTTRGHGPAETQTLGSLPDINLTQISTLANELRDSRLANDLRDSGATIRIG

SEQ ID NO: 13 - protein, 592 aa, Homo sapiens
  misc_feature: Anti-VISTA antibody - BTLA ECD fusion protein
  misc_feature: Heavy chain = Anti-VISTA heavy chain + BTLA ECD fusion sequence
QVQLVQSGAEVKKPGSSVKVSCKASGGTFSSYAISWVRQAPGQGLEWMGGIIPIPGTANYAQKFQGRVTITADESTSTAYMELSSLRSEDTAVYYCARSSYGWSYEFDYWGQGTLVTVSSASTKGPSVFPLAPSSKSTSGGTAALGCLVKDYFPEPVTVSWNSGALTSGVHTFPAVLQSSGLYSLSSVVTVPSSSLGTQTYICNVNHKPSNTKVDKKVEPKSCDKTHTCPPCPAPELLGGPSVFLFPPKPKDTLMISRTPEVTCVVVDVSHEDPEVKFNWYVDGVEVHNAKTKPREEQYASTYRVVSVLTVLHQDWLNGKEYKCKVSNKALPAPIEKTISKAKGQPREPQVYTLPPSREEMTKNQVSLTCLVKGFYPSDIAVEWESNGQPENNYKTTPPVLDSDGSFFLYSKLTVDKSRWQQGNVFSCSVMHEALHNHYTQKSLSLSPGKGGGGSGGGGSGGGGSKESCDVQLYIKRQSEHSILAGDPFELECPVKYCANRPHVTWCKLNGTTCVKLEDRQTSWKEEKNISFFILHFEPVLPNDNGSYRCSANFQSNLIESHSTTLYVTDVKSASERPSKDEMASRPWLLYR

SEQ ID NO: 14 - protein, 701 aa, Homo sapiens
  misc_feature: Anti-VISTA antibody - CD226 ECD fusion protein
  misc_feature: Heavy chain = Anti-VISTA heavy chain + CD226 ECD fusion
QVQLVQSGAEVKKPGSSVKVSCKASGGTFSSYAISWVRQAPGQGLEWMGGIIPIPGTANYAQKFQGRVTITADESTSTAYMELSSLRSEDTAVYYCARSSYGWSYEFDYWGQGTLVTVSSASTKGPSVFPLAPSSKSTSGGTAALGCLVKDYFPEPVTVSWNSGALTSGVHTFPAVLQSSGLYSLSSVVTVPSSSLGTQTYICNVNHKPSNTKVDKKVEPKSCDKTHTCPPCPAPELLGGPSVFLFPPKPKDTLMISRTPEVTCVVVDVSHEDPEVKFNWYVDGVEVHNAKTKPREEQYASTYRVVSVLTVLHQDWLNGKEYKCKVSNKALPAPIEKTISKAKGQPREPQVYTLPPSREEMTKNQVSLTCLVKGFYPSDIAVEWESNGQPENNYKTTPPVLDSDGSFFLYSKLTVDKSRWQQGNVFSCSVMHEALHNHYTQKSLSLSPGKGGGGSGGGGSGGGGSEEVLWHTSVPFAENMSLECVYPSMGILTQVEWFKIGTQQDSIAIFSPTHGMVIRKPYAERVYFLNSTMASNNMTLFFRNASEDDVGYYSCSLYTYPQGTWQKVIQVVQSDSFEAAVPSNSHIVSEPGKNVTLTCQPQMTWPVQAVRWEKIQPRQIDLLTYCNLVHGRNFTSKFPRQIVSNCSHGRWSVIVIPDVTVSDSGLYRCYLQASAGENETFVMRLTVAEGKTDNQYTLFVA

SEQ ID NO: 15 - protein, 609 aa, Homo sapiens
  misc_feature: Anti-TIGIT antibody - TGF?RII ECD fusion protein
  misc_feature: Heavy chain = Anti-TIGIT heavy chain + TGF?RII ECD fusion sequence
EVQLQESGPGLVKPSQSLSLTCSVTGSSIASDYWGWIRKFPGNKMEWMGFITYSGSTSYNPSLKSRISITRDTSKNQFFLQLHSVTTDDTATYSCARMPSFITLASLSTWEGYFDFWGPGTMVTVSSASTKGPSVFPLAPSSKSTSGGTAALGCLVKDYFPEPVTVSWNSGALTSGVHTFPAVLQSSGLYSLSSVVTVPSSSLGTQTYICNVNHKPSNTKVDKKVEPKSCDKTHTCPPCPAPELLGGPSVFLFPPKPKDTLMISRTPEVTCVVVDVSHEDPEVKFNWYVDGVEVHNAKTKPREEQYASTYRVVSVLTVLHQDWLNGKEYKCKVSNKALPAPIEKTISKAKGQPREPQVYTLPPSREEMTKNQVSLTCLVKGFYPSDIAVEWESNGQPENNYKTTPPVLDSDGSFFLYSKLTVDKSRWQQGNVFSCSVMHEALHNHYTQKSLSLSPGKGGGGSGGGGSGGGGSTIPPHVQKSVNNDMIVTDNNGAVKFPQLCKFCDVRFSTCDNQKSCMSNCSITSICEKPQEVCVAVWRKNDENITLETVCHDPKLPYHDFILEDAASPKCIMKEKKKPGETFFMCSCSSDECNDNIIFSEEYNTSNPD

SEQ ID NO: 16 - protein, 622 aa, Homo sapiens
  misc_feature: Anti-TIGIT antibody - PD-1 ECD fusion protein
  misc_feature: Heavy chain = Anti-TIGIT heavy chain + PD-1 ECD fusio
EVQLQESGPGLVKPSQSLSLTCSVTGSSIASDYWGWIRKFPGNKMEWMGFITYSGSTSYNPSLKSRISITRDTSKNQFFLQLHSVTTDDTATYSCARMPSFITLASLSTWEGYFDFWGPGTMVTVSSASTKGPSVFPLAPSSKSTSGGTAALGCLVKDYFPEPVTVSWNSGALTSGVHTFPAVLQSSGLYSLSSVVTVPSSSLGTQTYICNVNHKPSNTKVDKKVEPKSCDKTHTCPPCPAPELLGGPSVFLFPPKPKDTLMISRTPEVTCVVVDVSHEDPEVKFNWYVDGVEVHNAKTKPREEQYASTYRVVSVLTVLHQDWLNGKEYKCKVSNKALPAPIEKTISKAKGQPREPQVYTLPPSREEMTKNQVSLTCLVKGFYPSDIAVEWESNGQPENNYKTTPPVLDSDGSFFLYSKLTVDKSRWQQGNVFSCSVMHEALHNHYTQKSLSLSPGKGGGGSGGGGSGGGGSPGWFLDSPDRPWNPPTFSPALLVVTEGDNATFTCSFSNTSESFVLNWYRMSPSNQTDKLAAFPEDRSQPGQDCRFRVTQLPNGRDFHMSVVRARRNDSGTYLCGAISLAPKAQIKESLRAELRVTERRAEVPTAHPSPSPRPAGQFQTLV

SEQ ID NO: 17 - protein, 653 aa, Homo sapiens
  misc_feature: Anti-TIGIT antibody - TIM-3 ECD fusion protein
  misc_feature: Heavy chain = Anti-TIGIT heavy chain + TIM-3 ECD fusion sequence
EVQLQESGPGLVKPSQSLSLTCSVTGSSIASDYWGWIRKFPGNKMEWMGFITYSGSTSYNPSLKSRISITRDTSKNQFFLQLHSVTTDDTATYSCARMPSFITLASLSTWEGYFDFWGPGTMVTVSSASTKGPSVFPLAPSSKSTSGGTAALGCLVKDYFPEPVTVSWNSGALTSGVHTFPAVLQSSGLYSLSSVVTVPSSSLGTQTYICNVNHKPSNTKVDKKVEPKSCDKTHTCPPCPAPELLGGPSVFLFPPKPKDTLMISRTPEVTCVVVDVSHEDPEVKFNWYVDGVEVHNAKTKPREEQYASTYRVVSVLTVLHQDWLNGKEYKCKVSNKALPAPIEKTISKAKGQPREPQVYTLPPSREEMTKNQVSLTCLVKGFYPSDIAVEWESNGQPENNYKTTPPVLDSDGSFFLYSKLTVDKSRWQQGNVFSCSVMHEALHNHYTQKSLSLSPGKGGGGSGGGGSGGGGSSEVEYRAEVGQNAYLPCFYTPAAPGNLVPVCWGKGACPVFECGNVVLRTDERDVNYWTSRYWLNGDFRKGDVSLTIENVTLADSGIYCCRIQIPGIMNDEKFNLKLVIKPAKVTPAPTRQRDFTAAFPRMLTTRGHGPAETQTLGSLPDINLTQISTLANELRDSRLANDLRDSGATIRIG

SEQ ID NO: 18 - protein, 599 aa, Homo sapiens
  misc_feature: Anti-TIGIT antibody - BTLA ECD fusion protein
  misc_feature: Heavy chain = Anti-TIGIT heavy chain + BTLA ECD fusion sequence
EVQLQESGPGLVKPSQSLSLTCSVTGSSIASDYWGWIRKFPGNKMEWMGFITYSGSTSYNPSLKSRISITRDTSKNQFFLQLHSVTTDDTATYSCARMPSFITLASLSTWEGYFDFWGPGTMVTVSSASTKGPSVFPLAPSSKSTSGGTAALGCLVKDYFPEPVTVSWNSGALTSGVHTFPAVLQSSGLYSLSSVVTVPSSSLGTQTYICNVNHKPSNTKVDKKVEPKSCDKTHTCPPCPAPELLGGPSVFLFPPKPKDTLMISRTPEVTCVVVDVSHEDPEVKFNWYVDGVEVHNAKTKPREEQYASTYRVVSVLTVLHQDWLNGKEYKCKVSNKALPAPIEKTISKAKGQPREPQVYTLPPSREEMTKNQVSLTCLVKGFYPSDIAVEWESNGQPENNYKTTPPVLDSDGSFFLYSKLTVDKSRWQQGNVFSCSVMHEALHNHYTQKSLSLSPGKGGGGSGGGGSGGGGSKESCDVQLYIKRQSEHSILAGDPFELECPVKYCANRPHVTWCKLNGTTCVKLEDRQTSWKEEKNISFFILHFEPVLPNDNGSYRCSANFQSNLIESHSTTLYVTDVKSASERPSKDEMASRPWLLYR

SEQ ID NO: 19 - protein, 708 aa, Homo sapiens
  misc_feature: Anti-TIGIT antibody - CD226 ECD fusion protein
  misc_feature: Heavy chain = Anti-TIGIT heavy chain + CD226 ECD fusion sequence
EVQLQESGPGLVKPSQSLSLTCSVTGSSIASDYWGWIRKFPGNKMEWMGFITYSGSTSYNPSLKSRISITRDTSKNQFFLQLHSVTTDDTATYSCARMPSFITLASLSTWEGYFDFWGPGTMVTVSSASTKGPSVFPLAPSSKSTSGGTAALGCLVKDYFPEPVTVSWNSGALTSGVHTFPAVLQSSGLYSLSSVVTVPSSSLGTQTYICNVNHKPSNTKVDKKVEPKSCDKTHTCPPCPAPELLGGPSVFLFPPKPKDTLMISRTPEVTCVVVDVSHEDPEVKFNWYVDGVEVHNAKTKPREEQYASTYRVVSVLTVLHQDWLNGKEYKCKVSNKALPAPIEKTISKAKGQPREPQVYTLPPSREEMTKNQVSLTCLVKGFYPSDIAVEWESNGQPENNYKTTPPVLDSDGSFFLYSKLTVDKSRWQQGNVFSCSVMHEALHNHYTQKSLSLSPGKGGGGSGGGGSGGGGSEEVLWHTSVPFAENMSLECVYPSMGILTQVEWFKIGTQQDSIAIFSPTHGMVIRKPYAERVYFLNSTMASNNMTLFFRNASEDDVGYYSCSLYTYPQGTWQKVIQVVQSDSFEAAVPSNSHIVSEPGKNVTLTCQPQMTWPVQAVRWEKIQPRQIDLLTYCNLVHGRNFTSKFPRQIVSNCSHGRWSVIVIPDVTVSDSGLYRCYLQASAGENETFVMRLTVAEGKTDNQYTLFVA

SEQ ID NO: 20 - protein, 603 aa, Homo sapiens
  misc_feature: Anti-BTLA antibody - TGF?RII ECD fusion protein
  misc_feature: Heavy chain = Anti-BTLA heavy chain + TGF?RII ECD fusion sequence
EVQLVESGGGLVQPGGSLRLSCAASGFTISSYDMHWVRQATGKGLEWVSVIGPAGDTYYPGSVKGRFTISRENAKNSLYLQMNSLRAGDTAVYYCAREGMAAHNYYGMDVWGQGTTVTVSSASTKGPSVFPLAPSSKSTSGGTAALGCLVKDYFPEPVTVSWNSGALTSGVHTFPAVLQSSGLYSLSSVVTVPSSSLGTQTYICNVNHKPSNTKVDKKVEPKSCDKTHTCPPCPAPELLGGPSVFLFPPKPKDTLMISRTPEVTCVVVDVSHEDPEVKFNWYVDGVEVHNAKTKPREEQYASTYRVVSVLTVLHQDWLNGKEYKCKVSNKALPAPIEKTISKAKGQPREPQVYTLPPSREEMTKNQVSLTCLVKGFYPSDIAVEWESNGQPENNYKTTPPVLDSDGSFFLYSKLTVDKSRWQQGNVFSCSVMHEALHNHYTQKSLSLSPGKGGGGSGGGGSGGGGSTIPPHVQKSVNNDMIVTDNNGAVKFPQLCKFCDVRFSTCDNQKSCMSNCSITSICEKPQEVCVAVWRKNDENITLETVCHDPKLPYHDFILEDAASPKCIMKEKKKPGETFFMCSCSSDECNDNIIFSEEYNTSNPD

SEQ ID NO: 21 - protein, 616 aa, Homo sapiens
  misc_feature: Anti-BTLA antibody - PD-1 ECD fusion protein
  misc_feature: Heavy chain = Anti-BTLA heavy chain + PD-1 ECD fusion sequence
EVQLVESGGGLVQPGGSLRLSCAASGFTISSYDMHWVRQATGKGLEWVSVIGPAGDTYYPGSVKGRFTISRENAKNSLYLQMNSLRAGDTAVYYCAREGMAAHNYYGMDVWGQGTTVTVSSASTKGPSVFPLAPSSKSTSGGTAALGCLVKDYFPEPVTVSWNSGALTSGVHTFPAVLQSSGLYSLSSVVTVPSSSLGTQTYICNVNHKPSNTKVDKKVEPKSCDKTHTCPPCPAPELLGGPSVFLFPPKPKDTLMISRTPEVTCVVVDVSHEDPEVKFNWYVDGVEVHNAKTKPREEQYASTYRVVSVLTVLHQDWLNGKEYKCKVSNKALPAPIEKTISKAKGQPREPQVYTLPPSREEMTKNQVSLTCLVKGFYPSDIAVEWESNGQPENNYKTTPPVLDSDGSFFLYSKLTVDKSRWQQGNVFSCSVMHEALHNHYTQKSLSLSPGKGGGGSGGGGSGGGGSPGWFLDSPDRPWNPPTFSPALLVVTEGDNATFTCSFSNTSESFVLNWYRMSPSNQTDKLAAFPEDRSQPGQDCRFRVTQLPNGRDFHMSVVRARRNDSGTYLCGAISLAPKAQIKESLRAELRVTERRAEVPTAHPSPSPRPAGQFQTLV

SEQ ID NO: 22 - protein, 647 aa, Homo sapiens
  misc_feature: Anti-BTLA antibody - TIM-3 ECD fusion protein
  misc_feature: Heavy chain = Anti-BTLA heavy chain + TIM-3 ECD fusion sequence
EVQLVESGGGLVQPGGSLRLSCAASGFTISSYDMHWVRQATGKGLEWVSVIGPAGDTYYPGSVKGRFTISRENAKNSLYLQMNSLRAGDTAVYYCAREGMAAHNYYGMDVWGQGTTVTVSSASTKGPSVFPLAPSSKSTSGGTAALGCLVKDYFPEPVTVSWNSGALTSGVHTFPAVLQSSGLYSLSSVVTVPSSSLGTQTYICNVNHKPSNTKVDKKVEPKSCDKTHTCPPCPAPELLGGPSVFLFPPKPKDTLMISRTPEVTCVVVDVSHEDPEVKFNWYVDGVEVHNAKTKPREEQYASTYRVVSVLTVLHQDWLNGKEYKCKVSNKALPAPIEKTISKAKGQPREPQVYTLPPSREEMTKNQVSLTCLVKGFYPSDIAVEWESNGQPENNYKTTPPVLDSDGSFFLYSKLTVDKSRWQQGNVFSCSVMHEALHNHYTQKSLSLSPGKGGGGSGGGGSGGGGSSEVEYRAEVGQNAYLPCFYTPAAPGNLVPVCWGKGACPVFECGNVVLRTDERDVNYWTSRYWLNGDFRKGDVSLTIENVTLADSGIYCCRIQIPGIMNDEKFNLKLVIKPAKVTPAPTRQRDFTAAFPRMLTTRGHGPAETQTLGSLPDINLTQISTLANELRDSRLANDLRDSGATIRIG

SEQ ID NO: 23 - protein, 702 aa, Homo sapiens
  misc_feature: Anti-BTLA antibody - CD226 ECD fusion protein
  misc_feature: Heavy chain = Anti-BTLA heavy chain + CD226 ECD fusion sequence
EVQLVESGGGLVQPGGSLRLSCAASGFTISSYDMHWVRQATGKGLEWVSVIGPAGDTYYPGSVKGRFTISRENAKNSLYLQMNSLRAGDTAVYYCAREGMAAHNYYGMDVWGQGTTVTVSSASTKGPSVFPLAPSSKSTSGGTAALGCLVKDYFPEPVTVSWNSGALTSGVHTFPAVLQSSGLYSLSSVVTVPSSSLGTQTYICNVNHKPSNTKVDKKVEPKSCDKTHTCPPCPAPELLGGPSVFLFPPKPKDTLMISRTPEVTCVVVDVSHEDPEVKFNWYVDGVEVHNAKTKPREEQYASTYRVVSVLTVLHQDWLNGKEYKCKVSNKALPAPIEKTISKAKGQPREPQVYTLPPSREEMTKNQVSLTCLVKGFYPSDIAVEWESNGQPENNYKTTPPVLDSDGSFFLYSKLTVDKSRWQQGNVFSCSVMHEALHNHYTQKSLSLSPGKGGGGSGGGGSGGGGSEEVLWHTSVPFAENMSLECVYPSMGILTQVEWFKIGTQQDSIAIFSPTHGMVIRKPYAERVYFLNSTMASNNMTLFFRNASEDDVGYYSCSLYTYPQGTWQKVIQVVQSDSFEAAVPSNSHIVSEPGKNVTLTCQPQMTWPVQAVRWEKIQPRQIDLLTYCNLVHGRNFTSKFPRQIVSNCSHGRWSVIVIPDVTVSDSGLYRCYLQASAGENETFVMRLTVAEGKTDNQYTLFVA

SEQ ID NO: 24 - protein, 601 aa, Homo sapiens
  misc_feature: Anti-LAG-3 antibody - TGF?RII ECD fusion protein
  misc_feature: Heavy chain = Anti-LAG-3 heavy chain + TGF?RII ECD fusion sequence
QMQLVQSGPEVKKPGTSVKVSCKASGYTFTDYNVDWVRQARGQRLEWIGDINPNNGGTIYAQKFQERVTITVDKSTSTAYMELSSLRSEDTAVYYCARNYRWFGAMDHWGQGTTVTVSSASTKGPSVFPLAPSSKSTSGGTAALGCLVKDYFPEPVTVSWNSGALTSGVHTFPAVLQSSGLYSLSSVVTVPSSSLGTQTYICNVNHKPSNTKVDKKVEPKSCDKTHTCPPCPAPELLGGPSVFLFPPKPKDTLMISRTPEVTCVVVDVSHEDPEVKFNWYVDGVEVHNAKTKPREEQYASTYRVVSVLTVLHQDWLNGKEYKCKVSNKALPAPIEKTISKAKGQPREPQVYTLPPSREEMTKNQVSLTCLVKGFYPSDIAVEWESNGQPENNYKTTPPVLDSDGSFFLYSKLTVDKSRWQQGNVFSCSVMHEALHNHYTQKSLSLSPGKGGGGSGGGGSGGGGSTIPPHVQKSVNNDMIVTDNNGAVKFPQLCKFCDVRFSTCDNQKSCMSNCSITSICEKPQEVCVAVWRKNDENITLETVCHDPKLPYHDFILEDAASPKCIMKEKKKPGETFFMCSCSSDECNDNIIFSEEYNTSNPD

SEQ ID NO: 25 - protein, 614 aa, Homo sapiens
  misc_feature: Anti-LAG-3 antibody - PD-1 ECD fusion protein
  misc_feature: Heavy chain = Anti-LAG-3 heavy chain + PD-1 ECD fusion sequence
QMQLVQSGPEVKKPGTSVKVSCKASGYTFTDYNVDWVRQARGQRLEWIGDINPNNGGTIYAQKFQERVTITVDKSTSTAYMELSSLRSEDTAVYYCARNYRWFGAMDHWGQGTTVTVSSASTKGPSVFPLAPSSKSTSGGTAALGCLVKDYFPEPVTVSWNSGALTSGVHTFPAVLQSSGLYSLSSVVTVPSSSLGTQTYICNVNHKPSNTKVDKKVEPKSCDKTHTCPPCPAPELLGGPSVFLFPPKPKDTLMISRTPEVTCVVVDVSHEDPEVKFNWYVDGVEVHNAKTKPREEQYASTYRVVSVLTVLHQDWLNGKEYKCKVSNKALPAPIEKTISKAKGQPREPQVYTLPPSREEMTKNQVSLTCLVKGFYPSDIAVEWESNGQPENNYKTTPPVLDSDGSFFLYSKLTVDKSRWQQGNVFSCSVMHEALHNHYTQKSLSLSPGKGGGGSGGGGSGGGGSPGWFLDSPDRPWNPPTFSPALLVVTEGDNATFTCSFSNTSESFVLNWYRMSPSNQTDKLAAFPEDRSQPGQDCRFRVTQLPNGRDFHMSVVRARRNDSGTYLCGAISLAPKAQIKESLRAELRVTERRAEVPTAHPSPSPRPAGQFQTLV

SEQ ID NO: 26 - protein, 645 aa, Homo sapiens
  misc_feature: Anti-LAG-3 antibody - TIM-3 ECD fusion protein
  misc_feature: Heavy chain = Anti-LAG-3 heavy chain + TIM-3 ECD fusion sequence
QMQLVQSGPEVKKPGTSVKVSCKASGYTFTDYNVDWVRQARGQRLEWIGDINPNNGGTIYAQKFQERVTITVDKSTSTAYMELSSLRSEDTAVYYCARNYRWFGAMDHWGQGTTVTVSSASTKGPSVFPLAPSSKSTSGGTAALGCLVKDYFPEPVTVSWNSGALTSGVHTFPAVLQSSGLYSLSSVVTVPSSSLGTQTYICNVNHKPSNTKVDKKVEPKSCDKTHTCPPCPAPELLGGPSVFLFPPKPKDTLMISRTPEVTCVVVDVSHEDPEVKFNWYVDGVEVHNAKTKPREEQYASTYRVVSVLTVLHQDWLNGKEYKCKVSNKALPAPIEKTISKAKGQPREPQVYTLPPSREEMTKNQVSLTCLVKGFYPSDIAVEWESNGQPENNYKTTPPVLDSDGSFFLYSKLTVDKSRWQQGNVFSCSVMHEALHNHYTQKSLSLSPGKGGGGSGGGGSGGGGSSEVEYRAEVGQNAYLPCFYTPAAPGNLVPVCWGKGACPVFECGNVVLRTDERDVNYWTSRYWLNGDFRKGDVSLTIENVTLADSGIYCCRIQIPGIMNDEKFNLKLVIKPAKVTPAPTRQRDFTAAFPRMLTTRGHGPAETQTLGSLPDINLTQISTLANELRDSRLANDLRDSGATIRIG

SEQ ID NO: 27 - protein, 591 aa, Homo sapiens
  misc_feature: Anti-LAG-3 antibody - BTLA ECD fusion protein
  misc_feature: Heavy chain = Anti-LAG-3 heavy chain + BTLA ECD fusion sequence
QMQLVQSGPEVKKPGTSVKVSCKASGYTFTDYNVDWVRQARGQRLEWIGDINPNNGGTIYAQKFQERVTITVDKSTSTAYMELSSLRSEDTAVYYCARNYRWFGAMDHWGQGTTVTVSSASTKGPSVFPLAPSSKSTSGGTAALGCLVKDYFPEPVTVSWNSGALTSGVHTFPAVLQSSGLYSLSSVVTVPSSSLGTQTYICNVNHKPSNTKVDKKVEPKSCDKTHTCPPCPAPELLGGPSVFLFPPKPKDTLMISRTPEVTCVVVDVSHEDPEVKFNWYVDGVEVHNAKTKPREEQYASTYRVVSVLTVLHQDWLNGKEYKCKVSNKALPAPIEKTISKAKGQPREPQVYTLPPSREEMTKNQVSLTCLVKGFYPSDIAVEWESNGQPENNYKTTPPVLDSDGSFFLYSKLTVDKSRWQQGNVFSCSVMHEALHNHYTQKSLSLSPGKGGGGSGGGGSGGGGSKESCDVQLYIKRQSEHSILAGDPFELECPVKYCANRPHVTWCKLNGTTCVKLEDRQTSWKEEKNISFFILHFEPVLPNDNGSYRCSANFQSNLIESHSTTLYVTDVKSASERPSKDEMASRPWLLYR

SEQ ID NO: 28 - protein, 700 aa, Homo sapiens
  misc_feature: Anti-LAG-3 antibody - CD226 ECD fusion protein
  misc_feature: Heavy chain = Anti-LAG-3 heavy chain + CD226 ECD fusion sequence
QMQLVQSGPEVKKPGTSVKVSCKASGYTFTDYNVDWVRQARGQRLEWIGDINPNNGGTIYAQKFQERVTITVDKSTSTAYMELSSLRSEDTAVYYCARNYRWFGAMDHWGQGTTVTVSSASTKGPSVFPLAPSSKSTSGGTAALGCLVKDYFPEPVTVSWNSGALTSGVHTFPAVLQSSGLYSLSSVVTVPSSSLGTQTYICNVNHKPSNTKVDKKVEPKSCDKTHTCPPCPAPELLGGPSVFLFPPKPKDTLMISRTPEVTCVVVDVSHEDPEVKFNWYVDGVEVHNAKTKPREEQYASTYRVVSVLTVLHQDWLNGKEYKCKVSNKALPAPIEKTISKAKGQPREPQVYTLPPSREEMTKNQVSLTCLVKGFYPSDIAVEWESNGQPENNYKTTPPVLDSDGSFFLYSKLTVDKSRWQQGNVFSCSVMHEALHNHYTQKSLSLSPGKGGGGSGGGGSGGGGSEEVLWHTSVPFAENMSLECVYPSMGILTQVEWFKIGTQQDSIAIFSPTHGMVIRKPYAERVYFLNSTMASNNMTLFFRNASEDDVGYYSCSLYTYPQGTWQKVIQVVQSDSFEAAVPSNSHIVSEPGKNVTLTCQPQMTWPVQAVRWEKIQPRQIDLLTYCNLVHGRNFTSKFPRQIVSNCSHGRWSVIVIPDVTVSDSGLYRCYLQASAGENETFVMRLTVAEGKTDNQYTLFVA

SEQ ID NO: 29 - protein, 601 aa, Homo sapiens
  misc_feature: Anti-CCR4 antibody - TGF?RII ECD fusion protein
  misc_feature: Heavy chain = Anti-CCR4 heavy chain + TGF?RII ECD fusion sequence
EVQLVESGGDLVQPGRSLRLSCAASGFIFSNYGMSWVRQAPGKGLEWVATISSASTYSYYPDSVKGRFTISRDNAKNSLYLQMNSLRVEDTALYYCGRHSDGNFAFGYWGQGTLVTVSSASTKGPSVFPLAPSSKSTSGGTAALGCLVKDYFPEPVTVSWNSGALTSGVHTFPAVLQSSGLYSLSSVVTVPSSSLGTQTYICNVNHKPSNTKVDKKVEPKSCDKTHTCPPCPAPELLGGPSVFLFPPKPKDTLMISRTPEVTCVVVDVSHEDPEVKFNWYVDGVEVHNAKTKPREEQYASTYRVVSVLTVLHQDWLNGKEYKCKVSNKALPAPIEKTISKAKGQPREPQVYTLPPSREEMTKNQVSLTCLVKGFYPSDIAVEWESNGQPENNYKTTPPVLDSDGSFFLYSKLTVDKSRWQQGNVFSCSVMHEALHNHYTQKSLSLSPGKGGGGSGGGGSGGGGSTIPPHVQKSVNNDMIVTDNNGAVKFPQLCKFCDVRFSTCDNQKSCMSNCSITSICEKPQEVCVAVWRKNDENITLETVCHDPKLPYHDFILEDAASPKCIMKEKKKPGETFFMCSCSSDECNDNIIFSEEYNTSNPD

SEQ ID NO: 30 - protein, 1228 aa, Homo sapiens
  misc_feature: Anti-CCR4 antibody - PD-1 ECD fusion protein
  misc_feature: Heavy chain = Anti-CCR4 heavy chain + PD-1 ECD fusion sequence
EVQLVESGGDLVQPGRSLRLSCAASGFIFSNYGMSWVRQAPGKGLEWVATISSASTYSYYPDSVKGRFTISRDNAKNSLYLQMNSLRVEDTALYYCGRHSDGNFAFGYWGQGTLVTVSSASTKGPSVFPLAPSSKSTSGGTAALGCLVKDYFPEPVTVSWNSGALTSGVHTFPAVLQSSGLYSLSSVVTVPSSSLGTQTYICNVNHKPSNTKVDKKVEPKSCDKTHTCPPCPAPELLGGPSVFLFPPKPKDTLMISRTPEVTCVVVDVSHEDPEVKFNWYVDGVEVHNAKTKPREEQYASTYRVVSVLTVLHQDWLNGKEYKCKVSNKALPAPIEKTISKAKGQPREPQVYTLPPSREEMTKNQVSLTCLVKGFYPSDIAVEWESNGQPENNYKTTPPVLDSDGSFFLYSKLTVDKSRWQQGNVFSCSVMHEALHNHYTQKSLSLSPGKGGGGSGGGGSGGGGSPGWFLDSPDRPWNPPTFSPALLVVTEGDNATFTCSFSNTSESFVLNWYRMSPSNQTDKLAAFPEDRSQPGQDCRFRVTQLPNGRDFHMSVVRARRNDSGTYLCGAISLAPKAQIKESLRAELRVTERRAEVPTAHPSPSPRPAGQFQTLVEVQLVESGGDLVQPGRSLRLSCAASGFIFSNYGMSWVRQAPGKGLEWVATISSASTYSYYPDSVKGRFTISRDNAKNSLYLQMNSLRVEDTALYYCGRHSDGNFAFGYWGQGTLVTVSSASTKGPSVFPLAPSSKSTSGGTAALGCLVKDYFPEPVTVSWNSGALTSGVHTFPAVLQSSGLYSLSSVVTVPSSSLGTQTYICNVNHKPSNTKVDKKVEPKSCDKTHTCPPCPAPELLGGPSVFLFPPKPKDTLMISRTPEVTCVVVDVSHEDPEVKFNWYVDGVEVHNAKTKPREEQYASTYRVVSVLTVLHQDWLNGKEYKCKVSNKALPAPIEKTISKAKGQPREPQVYTLPPSREEMTKNQVSLTCLVKGFYPSDIAVEWESNGQPENNYKTTPPVLDSDGSFFLYSKLTVDKSRWQQGNVFSCSVMHEALHNHYTQKSLSLSPGKGGGGSGGGGSGGGGSPGWFLDSPDRPWNPPTFSPALLVVTEGDNATFTCSFSNTSESFVLNWYRMSPSNQTDKLAAFPEDRSQPGQDCRFRVTQLPNGRDFHMSVVRARRNDSGTYLCGAISLAPKAQIKESLRAELRVTERRAEVPTAHPSPSPRPAGQFQTLV

SEQ ID NO: 31 - protein, 645 aa, Homo sapiens
  misc_feature: Anti-CCR4 antibody - TIM-3 ECD fusion protein
  misc_feature: Heavy chain = Anti-CCR4 heavy chain + TIM-3 ECD fusion sequence
EVQLVESGGDLVQPGRSLRLSCAASGFIFSNYGMSWVRQAPGKGLEWVATISSASTYSYYPDSVKGRFTISRDNAKNSLYLQMNSLRVEDTALYYCGRHSDGNFAFGYWGQGTLVTVSSASTKGPSVFPLAPSSKSTSGGTAALGCLVKDYFPEPVTVSWNSGALTSGVHTFPAVLQSSGLYSLSSVVTVPSSSLGTQTYICNVNHKPSNTKVDKKVEPKSCDKTHTCPPCPAPELLGGPSVFLFPPKPKDTLMISRTPEVTCVVVDVSHEDPEVKFNWYVDGVEVHNAKTKPREEQYASTYRVVSVLTVLHQDWLNGKEYKCKVSNKALPAPIEKTISKAKGQPREPQVYTLPPSREEMTKNQVSLTCLVKGFYPSDIAVEWESNGQPENNYKTTPPVLDSDGSFFLYSKLTVDKSRWQQGNVFSCSVMHEALHNHYTQKSLSLSPGKGGGGSGGGGSGGGGSSEVEYRAEVGQNAYLPCFYTPAAPGNLVPVCWGKGACPVFECGNVVLRTDERDVNYWTSRYWLNGDFRKGDVSLTIENVTLADSGIYCCRIQIPGIMNDEKFNLKLVIKPAKVTPAPTRQRDFTAAFPRMLTTRGHGPAETQTLGSLPDINLTQISTLANELRDSRLANDLRDSGATIRIG

SEQ ID NO: 32 - protein, 591 aa, Homo sapiens
  misc_feature: Anti-CCR4 antibody - BTLA ECD fusion protein
  misc_feature: Heavy chain = Anti-CCR4 heavy chain + BTLA ECD fusion sequence
EVQLVESGGDLVQPGRSLRLSCAASGFIFSNYGMSWVRQAPGKGLEWVATISSASTYSYYPDSVKGRFTISRDNAKNSLYLQMNSLRVEDTALYYCGRHSDGNFAFGYWGQGTLVTVSSASTKGPSVFPLAPSSKSTSGGTAALGCLVKDYFPEPVTVSWNSGALTSGVHTFPAVLQSSGLYSLSSVVTVPSSSLGTQTYICNVNHKPSNTKVDKKVEPKSCDKTHTCPPCPAPELLGGPSVFLFPPKPKDTLMISRTPEVTCVVVDVSHEDPEVKFNWYVDGVEVHNAKTKPREEQYASTYRVVSVLTVLHQDWLNGKEYKCKVSNKALPAPIEKTISKAKGQPREPQVYTLPPSREEMTKNQVSLTCLVKGFYPSDIAVEWESNGQPENNYKTTPPVLDSDGSFFLYSKLTVDKSRWQQGNVFSCSVMHEALHNHYTQKSLSLSPGKGGGGSGGGGSGGGGSKESCDVQLYIKRQSEHSILAGDPFELECPVKYCANRPHVTWCKLNGTTCVKLEDRQTSWKEEKNISFFILHFEPVLPNDNGSYRCSANFQSNLIESHSTTLYVTDVKSASERPSKDEMASRPWLLYR

SEQ ID NO: 33 - protein, 700 aa, Homo sapiens
  misc_feature: Anti-CCR4 antibody - CD226 ECD fusion protein
  misc_feature: Heavy chain = Anti-CCR4 heavy chain + CD226 ECD fusion sequence
EVQLVESGGDLVQPGRSLRLSCAASGFIFSNYGMSWVRQAPGKGLEWVATISSASTYSYYPDSVKGRFTISRDNAKNSLYLQMNSLRVEDTALYYCGRHSDGNFAFGYWGQGTLVTVSSASTKGPSVFPLAPSSKSTSGGTAALGCLVKDYFPEPVTVSWNSGALTSGVHTFPAVLQSSGLYSLSSVVTVPSSSLGTQTYICNVNHKPSNTKVDKKVEPKSCDKTHTCPPCPAPELLGGPSVFLFPPKPKDTLMISRTPEVTCVVVDVSHEDPEVKFNWYVDGVEVHNAKTKPREEQYASTYRVVSVLTVLHQDWLNGKEYKCKVSNKALPAPIEKTISKAKGQPREPQVYTLPPSREEMTKNQVSLTCLVKGFYPSDIAVEWESNGQPENNYKTTPPVLDSDGSFFLYSKLTVDKSRWQQGNVFSCSVMHEALHNHYTQKSLSLSPGKGGGGSGGGGSGGGGSEEVLWHTSVPFAENMSLECVYPSMGILTQVEWFKIGTQQDSIAIFSPTHGMVIRKPYAERVYFLNSTMASNNMTLFFRNASEDDVGYYSCSLYTYPQGTWQKVIQVVQSDSFEAAVPSNSHIVSEPGKNVTLTCQPQMTWPVQAVRWEKIQPRQIDLLTYCNLVHGRNFTSKFPRQIVSNCSHGRWSVIVIPDVTVSDSGLYRCYLQASAGENETFVMRLTVAEGKTDNQYTLFVA

SEQ ID NO: 34 - protein, 582 aa, Homo sapiens
  misc_feature: Anti-PD-1 antibody (Nivolumab) - BTLA ECD fusion protein
  misc_feature: Heavy chain = Anti-PD-1 heavy chain + BTLA ECD fusion sequence
QVQLVESGGGVVQPGRSLRLDCKASGITFSNSGMHWVRQAPGKGLEWVAVIWYDGSKRYYADSVKGRFTISRDNSKNTLFLQMNSLRAEDTAVYYCATNDDYWGQGTLVTVSSASTKGPSVFPLAPCSRSTSESTAALGCLVKDYFPEPVTVSWNSGALTSGVHTFPAVLQSSGLYSLSSVVTVPSSSLGTKTYTCNVDHKPSNTKVDKRVESKYGPPCPPCPAPEFLGGPSVFLFPPKPKDTLMISRTPEVTCVVVDVSQEDPEVQFNWYVDGVEVHNAKTKPREEQFNSTYRVVSVLTVLHQDWLNGKEYKCKVSNKGLPSSIEKTISKAKGQPREPQVYTLPPSQEEMTKNQVSLTCLVKGFYPSDIAVEWESNGQPENNYKTTPPVLDSDGSFFLYSRLTVDKSRWQEGNVFSCSVMHEALHNHYTQKSLSLSLGKGGGGSGGGGSGGGGSKESCDVQLYIKRQSEHSILAGDPFELECPVKYCANRPHVTWCKLNGTTCVKLEDRQTSWKEEKNISFFILHFEPVLPNDNGSYRCSANFQSNLIESHSTTLYVTDVKSASERPSKDEMASRPWLLYR

SEQ ID NO: 35 - protein, 691 aa, Homo sapiens
  misc_feature: Anti-PD-1 antibody (Nivolumab) - CD226 ECD fusion protein
  misc_feature: Heavy chain = Anti-PD-1 heavy chain + CD226 ECD fusion sequence
QVQLVESGGGVVQPGRSLRLDCKASGITFSNSGMHWVRQAPGKGLEWVAVIWYDGSKRYYADSVKGRFTISRDNSKNTLFLQMNSLRAEDTAVYYCATNDDYWGQGTLVTVSSASTKGPSVFPLAPCSRSTSESTAALGCLVKDYFPEPVTVSWNSGALTSGVHTFPAVLQSSGLYSLSSVVTVPSSSLGTKTYTCNVDHKPSNTKVDKRVESKYGPPCPPCPAPEFLGGPSVFLFPPKPKDTLMISRTPEVTCVVVDVSQEDPEVQFNWYVDGVEVHNAKTKPREEQFNSTYRVVSVLTVLHQDWLNGKEYKCKVSNKGLPSSIEKTISKAKGQPREPQVYTLPPSQEEMTKNQVSLTCLVKGFYPSDIAVEWESNGQPENNYKTTPPVLDSDGSFFLYSRLTVDKSRWQEGNVFSCSVMHEALHNHYTQKSLSLSLGKGGGGSGGGGSGGGGSEEVLWHTSVPFAENMSLECVYPSMGILTQVEWFKIGTQQDSIAIFSPTHGMVIRKPYAERVYFLNSTMASNNMTLFFRNASEDDVGYYSCSLYTYPQGTWQKVIQVVQSDSFEAAVPSNSHIVSEPGKNVTLTCQPQMTWPVQAVRWEKIQPRQIDLLTYCNLVHGRNFTSKFPRQIVSNCSHGRWSVIVIPDVTVSDSGLYRCYLQASAGENETFVMRLTVAEGKTDNQYTLFVA

SEQ ID NO: 36 - protein, 629 aa, Homo sapiens
  misc_feature: Anti-PD-1 antibody (Nivolumab) - CD44 ECD fusion protein
  misc_feature: Extracellular sequence of CD44
QIDLNITCRFAGVFHVEKNGRYSISRTEAADLCKAFNSTLPTMAQMEKALSIGFETCRYGFIEGHVVIPRIHPNSICAANNTGVYILTSNTSQYDTYCFNASAPPEEDCTSVTDLPNAFDGPITITIVNRDGTRYVQKGEYRTNPEDIYPSNPTDDDVSSGSSSERSSTSGGYIFYTFSTVHPIPDEDSPWITDSTDRIPATTLMSTSATATETATKRQETWDWFSWLFLPSESKNHLHTTTQMAGTSSNTISAGWEPNEENEDERDRHLSFSGSGIDDDEDFISSTISTTPRAFDHTKQNQDWTQWNPSHSNPEVLLQTTTRMTDVDRNGTTAYEGNWNPEAHPPLIHHEHHEEEETPHSTSTIQATPSSTTEETATQKEQWFGNRWHEGYRQTPKEDSHSTTGTAAASAHTSHPMQGRTTPSPEDSSWTDFFNPISHPMGRGHQAGRRMDMDSSHSITLQPTANPNTGLVEDLDRTGPLSMTTQQSNSQSFSTSHEGLEEDKDHPTTSTLTSSNRNDVTGGRRDPNHSEGSTTLLEGYTSHYPHTKESRTFIPVTSAKTGSFGVTAVTVGDSNSNVNRSLSGDQDTFHPSGGSHTTHGSESDGHSHGSQEGGANTTSGPIRTPQIPE

SEQ ID NO: 37 - protein, 655 aa, Homo sapiens
  misc_feature: Anti-PD-1 antibody (Nivolumab) - CD44 ECD fusion protein
  misc_feature: Heavy chain = Anti-PD-1 heavy chain + CD44 ECD fusion seque
QVQLVESGGGVVQPGRSLRLDCKASGITFSNSGMHWVRQAPGKGLEWVAVIWYDGSKRYYADSVKGRFTISRDNSKNTLFLQMNSLRAEDTAVYYCATNDDYWGQGTLVTVSSASTKGPSVFPLAPCSRSTSESTAALGCLVKDYFPEPVTVSWNSGALTSGVHTFPAVLQSSGLYSLSSVVTVPSSSLGTKTYTCNVDHKPSNTKVDKRVESKYGPPCPPCPAPEFLGGPSVFLFPPKPKDTLMISRTPEVTCVVVDVSQEDPEVQFNWYVDGVEVHNAKTKPREEQFNSTYRVVSVLTVLHQDWLNGKEYKCKVSNKGLPSSIEKTISKAKGQPREPQVYTLPPSQEEMTKNQVSLTCLVKGFYPSDIAVEWESNGQPENNYKTTPPVLDSDGSFFLYSRLTVDKSRWQEGNVFSCSVMHEALHNHYTQKSLSLSLGKGGGGSGGGGSGGGGSQIDLNITCRFAGVFHVEKNGRYSISRTEAADLCKAFNSTLPTMAQMEKALSIGFETCRYGFIEGHVVIPRIHPNSICAANNTGVYILTSNTSQYDTYCFNASAPPEEDCTSVTDLPNAFDGPITITIVNRDGTRYVQKGEYRTNPEDIYPSNPTDDDVSSGSSSERSSTSGGYIFYTFSTVHPIPDEDSPWITDSTDRIP

SEQ ID NO: 38 - protein, 663 aa, Homo sapiens
  misc_feature: nti-CTLA-4 antibody (Ipilimumab) - CD44 ECD fusion protein
  misc_feature: Heavy chain = Anti-CTLA-4 heavy chain + CD44 ECD fusion sequence
QVQLVESGGGVVQPGRSLRLSCAASGFTFSSYTMHWVRQAPGKGLEWVTFISYDGNNKYYADSVKGRFTISRDNSKNTLYLQMNSLRAEDTAIYYCARTGWLGPFDYWGQGTLVTVSSASTKGPSVFPLAPSSKSTSGGTAALGCLVKDYFPEPVTVSWNSGALTSGVHTFPAVLQSSGLYSLSSVVTVPSSSLGTQTYICNVNHKPSNTKVDKRVEPKSCDKTHTCPPCPAPELLGGPSVFLFPPKPKDTLMISRTPEVTCVVVDVSHEDPEVKFNWYVDGVEVHNAKTKPREEQYNSTYRVVSVLTVLHQDWLNGKEYKCKVSNKALPAPIEKTISKAKGQPREPQVYTLPPSRDELTKNQVSLTCLVKGFYPSDIAVEWESNGQPENNYKTTPPVLDSDGSFFLYSKLTVDKSRWQQGNVFSCSVMHEALHNHYTQKSLSLSPGKGGGGSGGGGSGGGGSQIDLNITCRFAGVFHVEKNGRYSISRTEAADLCKAFNSTLPTMAQMEKALSIGFETCRYGFIEGHVVIPRIHPNSICAANNTGVYILTSNTSQYDTYCFNASAPPEEDCTSVTDLPNAFDGPITITIVNRDGTRYVQKGEYRTNPEDIYPSNPTDDDVSSGSSSERSSTSGGYIFYTFSTVHPIPDEDSPWITDSTDRIP

SEQ ID NO: 39 - protein, 664 aa, Homo sapiens
  misc_feature: Anti-LAG-3 antibody - CD44 ECD fusion protein
  misc_feature: Heavy chain = Anti-LAG-3 heavy chain + CD44 ECD fusion sequence
QMQLVQSGPEVKKPGTSVKVSCKASGYTFTDYNVDWVRQARGQRLEWIGDINPNNGGTIYAQKFQERVTITVDKSTSTAYMELSSLRSEDTAVYYCARNYRWFGAMDHWGQGTTVTVSSASTKGPSVFPLAPSSKSTSGGTAALGCLVKDYFPEPVTVSWNSGALTSGVHTFPAVLQSSGLYSLSSVVTVPSSSLGTQTYICNVNHKPSNTKVDKKVEPKSCDKTHTCPPCPAPELLGGPSVFLFPPKPKDTLMISRTPEVTCVVVDVSHEDPEVKFNWYVDGVEVHNAKTKPREEQYASTYRVVSVLTVLHQDWLNGKEYKCKVSNKALPAPIEKTISKAKGQPREPQVYTLPPSREEMTKNQVSLTCLVKGFYPSDIAVEWESNGQPENNYKTTPPVLDSDGSFFLYSKLTVDKSRWQQGNVFSCSVMHEALHNHYTQKSLSLSPGKGGGGSGGGGSGGGGSQIDLNITCRFAGVFHVEKNGRYSISRTEAADLCKAFNSTLPTMAQMEKALSIGFETCRYGFIEGHVVIPRIHPNSICAANNTGVYILTSNTSQYDTYCFNASAPPEEDCTSVTDLPNAFDGPITITIVNRDGTRYVQKGEYRTNPEDIYPSNPTDDDVSSGSSSERSSTSGGYIFYTFSTVHPIPDEDSPWITDSTDRIP

SEQ ID NO: 40 - protein, 672 aa, Homo sapiens
  misc_feature: Anti-TIGIT antibody - CD44 ECD fusion protein
  misc_feature: Heavy chain = Anti-TIGIT heavy chain + CD44 ECD fusion sequence
EVQLQESGPGLVKPSQSLSLTCSVTGSSIASDYWGWIRKFPGNKMEWMGFITYSGSTSYNPSLKSRISITRDTSKNQFFLQLHSVTTDDTATYSCARMPSFITLASLSTWEGYFDFWGPGTMVTVSSASTKGPSVFPLAPSSKSTSGGTAALGCLVKDYFPEPVTVSWNSGALTSGVHTFPAVLQSSGLYSLSSVVTVPSSSLGTQTYICNVNHKPSNTKVDKKVEPKSCDKTHTCPPCPAPELLGGPSVFLFPPKPKDTLMISRTPEVTCVVVDVSHEDPEVKFNWYVDGVEVHNAKTKPREEQYASTYRVVSVLTVLHQDWLNGKEYKCKVSNKALPAPIEKTISKAKGQPREPQVYTLPPSREEMTKNQVSLTCLVKGFYPSDIAVEWESNGQPENNYKTTPPVLDSDGSFFLYSKLTVDKSRWQQGNVFSCSVMHEALHNHYTQKSLSLSPGKGGGGSGGGGSGGGGSQIDLNITCRFAGVFHVEKNGRYSISRTEAADLCKAFNSTLPTMAQMEKALSIGFETCRYGFIEGHVVIPRIHPNSICAANNTGVYILTSNTSQYDTYCFNASAPPEEDCTSVTDLPNAFDGPITITIVNRDGTRYVQKGEYRTNPEDIYPSNPTDDDVSSGSSSERSSTSGGYIFYTFSTVHPIPDEDSPWITDSTDRIP

SEQ ID NO: 41 - protein, 666 aa, Homo sapiens
  misc_feature: Anti-BTLA antibody - CD44 ECD fusion protein
  misc_feature: Heavy chain = Anti-BTLA heavy chain + CD44 ECD fusion sequence
EVQLVESGGGLVQPGGSLRLSCAASGFTISSYDMHWVRQATGKGLEWVSVIGPAGDTYYPGSVKGRFTISRENAKNSLYLQMNSLRAGDTAVYYCAREGMAAHNYYGMDVWGQGTTVTVSSASTKGPSVFPLAPSSKSTSGGTAALGCLVKDYFPEPVTVSWNSGALTSGVHTFPAVLQSSGLYSLSSVVTVPSSSLGTQTYICNVNHKPSNTKVDKKVEPKSCDKTHTCPPCPAPELLGGPSVFLFPPKPKDTLMISRTPEVTCVVVDVSHEDPEVKFNWYVDGVEVHNAKTKPREEQYASTYRVVSVLTVLHQDWLNGKEYKCKVSNKALPAPIEKTISKAKGQPREPQVYTLPPSREEMTKNQVSLTCLVKGFYPSDIAVEWESNGQPENNYKTTPPVLDSDGSFFLYSKLTVDKSRWQQGNVFSCSVMHEALHNHYTQKSLSLSPGKGGGGSGGGGSGGGGSQIDLNITCRFAGVFHVEKNGRYSISRTEAADLCKAFNSTLPTMAQMEKALSIGFETCRYGFIEGHVVIPRIHPNSICAANNTGVYILTSNTSQYDTYCFNASAPPEEDCTSVTDLPNAFDGPITITIVNRDGTRYVQKGEYRTNPEDIYPSNPTDDDVSSGSSSERSSTSGGYIFYTFSTVHPIPDEDSPWITDSTDRIP

SEQ ID NO: 42 - protein, 665 aa, Homo sapiens
  misc_feature: Anti-VISTA antibody - CD44 ECD fusion protein
  misc_feature: Heavy chain = Anti-VISTA heavy chain + CD44 ECD fusion sequence
QVQLVQSGAEVKKPGSSVKVSCKASGGTFSSYAISWVRQAPGQGLEWMGGIIPIPGTANYAQKFQGRVTITADESTSTAYMELSSLRSEDTAVYYCARSSYGWSYEFDYWGQGTLVTVSSASTKGPSVFPLAPSSKSTSGGTAALGCLVKDYFPEPVTVSWNSGALTSGVHTFPAVLQSSGLYSLSSVVTVPSSSLGTQTYICNVNHKPSNTKVDKKVEPKSCDKTHTCPPCPAPELLGGPSVFLFPPKPKDTLMISRTPEVTCVVVDVSHEDPEVKFNWYVDGVEVHNAKTKPREEQYASTYRVVSVLTVLHQDWLNGKEYKCKVSNKALPAPIEKTISKAKGQPREPQVYTLPPSREEMTKNQVSLTCLVKGFYPSDIAVEWESNGQPENNYKTTPPVLDSDGSFFLYSKLTVDKSRWQQGNVFSCSVMHEALHNHYTQKSLSLSPGKGGGGSGGGGSGGGGSQIDLNITCRFAGVFHVEKNGRYSISRTEAADLCKAFNSTLPTMAQMEKALSIGFETCRYGFIEGHVVIPRIHPNSICAANNTGVYILTSNTSQYDTYCFNASAPPEEDCTSVTDLPNAFDGPITITIVNRDGTRYVQKGEYRTNPEDIYPSNPTDDDVSSGSSSERSSTSGGYIFYTFSTVHPIPDEDSPWITDSTDRIP

SEQ ID NO: 43 - protein, 664 aa, Homo sapiens
  misc_feature: Anti-CCR4 antibody - CD44 ECD fusion protein
  misc_feature: Heavy chain = Anti-CCR4 heavy chain + CD44 ECD fusion sequence
EVQLVESGGDLVQPGRSLRLSCAASGFIFSNYGMSWVRQAPGKGLEWVATISSASTYSYYPDSVKGRFTISRDNAKNSLYLQMNSLRVEDTALYYCGRHSDGNFAFGYWGQGTLVTVSSASTKGPSVFPLAPSSKSTSGGTAALGCLVKDYFPEPVTVSWNSGALTSGVHTFPAVLQSSGLYSLSSVVTVPSSSLGTQTYICNVNHKPSNTKVDKKVEPKSCDKTHTCPPCPAPELLGGPSVFLFPPKPKDTLMISRTPEVTCVVVDVSHEDPEVKFNWYVDGVEVHNAKTKPREEQYASTYRVVSVLTVLHQDWLNGKEYKCKVSNKALPAPIEKTISKAKGQPREPQVYTLPPSREEMTKNQVSLTCLVKGFYPSDIAVEWESNGQPENNYKTTPPVLDSDGSFFLYSKLTVDKSRWQQGNVFSCSVMHEALHNHYTQKSLSLSPGKGGGGSGGGGSGGGGSQIDLNITCRFAGVFHVEKNGRYSISRTEAADLCKAFNSTLPTMAQMEKALSIGFETCRYGFIEGHVVIPRIHPNSICAANNTGVYILTSNTSQYDTYCFNASAPPEEDCTSVTDLPNAFDGPITITIVNRDGTRYVQKGEYRTNPEDIYPSNPTDDDVSSGSSSERSSTSGGYIFYTFSTVHPIPDEDSPWITDSTDRIP

SEQ ID NO: 44 - protein, 590 aa, Homo sapiens
  misc_feature: Anti-CTLA-4 antibody (Ipilimumab) - BTLA ECD fusion protein
  misc_feature: Heavy chain = Anti-CTLA-4 heavy chain + BTLA ECD fusion sequence
QVQLVESGGGVVQPGRSLRLSCAASGFTFSSYTMHWVRQAPGKGLEWVTFISYDGNNKYYADSVKGRFTISRDNSKNTLYLQMNSLRAEDTAIYYCARTGWLGPFDYWGQGTLVTVSSASTKGPSVFPLAPSSKSTSGGTAALGCLVKDYFPEPVTVSWNSGALTSGVHTFPAVLQSSGLYSLSSVVTVPSSSLGTQTYICNVNHKPSNTKVDKRVEPKSCDKTHTCPPCPAPELLGGPSVFLFPPKPKDTLMISRTPEVTCVVVDVSHEDPEVKFNWYVDGVEVHNAKTKPREEQYNSTYRVVSVLTVLHQDWLNGKEYKCKVSNKALPAPIEKTISKAKGQPREPQVYTLPPSRDELTKNQVSLTCLVKGFYPSDIAVEWESNGQPENNYKTTPPVLDSDGSFFLYSKLTVDKSRWQQGNVFSCSVMHEALHNHYTQKSLSLSPGKGGGGSGGGGSGGGGSKESCDVQLYIKRQSEHSILAGDPFELECPVKYCANRPHVTWCKLNGTTCVKLEDRQTSWKEEKNISFFILHFEPVLPNDNGSYRCSANFQSNLIESHSTTLYVTDVKSASERPSKDEMASRPWLLYR

SEQ ID NO: 45 - protein, 589 aa, Homo sapiens
  misc_feature: Anti-PD-1 antibody (Pembrolizumab) - BTLA ECD antibody-ligand trap
  misc_feature: Heavy chain = Anti-PD-1 heavy chain + BTLA ECD fusion 	sequence
QVQLVQSGVEVKKPGASVKVSCKASGYTFTNYYMYWVRQAPGQGLEWMGGINPSNGGTNFNEKFKNRVTLTTDSSTTTAYMELKSLQFDDTAVYYCARRDYRFDMGFDYWGQGTTVTVSSASTKGPSVFPLAPCSRSTSESTAALGCLVKDYFPEPVTVSWNSGALTSGVHTFPAVLQSSGLYSLSSVVTVPSSSLGTKTYTCNVDHKPSNTKVDKRVESKYGPPCPPCPAPEFLGGPSVFLFPPKPKDTLMISRTPEVTCVVVDVSQEDPEVQFNWYVDGVEVHNAKTKPREEQFNSTYRVVSVLTVLHQDWLNGKEYKCKVSNKGLPSSIEKTISKAKGQPREPQVYTLPPSQEEMTKNQVSLTCLVKGFYPSDIAVEWESNGQPENNYKTTPPVLDSDGSFFLYSRLTVDKSRWQEGNVFSCSVMHEALHNHYTQKSLSLSLGKGGGGSGGGGSGGGGSKESCDVQLYIKRQSEHSILAGDPFELECPVKYCANRPHVTWCKLNGTTCVKLEDRQTSWKEEKNISFFILHFEPVLPNDNGSYRCSANFQSNLIESHSTTLYVTDVKSASERPSKDEMASRPWLLYR

SEQ ID NO: 46 - protein, 590 aa, Homo sapiens
  misc_feature: Anti-PD-L1 antibody- BTLA ECD fusion antibody-ligand trap
  misc_feature: Heavy chain = Anti-PD-L1 heavy chain + BTLA ECD fusion sequence
EVQLVESGGGLVQPGGSLRLSCAASGFTFSDSWIHWVRQAPGKGLEWVAWISPYGGSTYYADSVKGRFTISADTSKNTAYLQMNSLRAEDTAVYYCARRHWPGGFDYWGQGTLVTVSAASTKGPSVFPLAPSSKSTSGGTAALGCLVKDYFPEPVTVSWNSGALTSGVHTFPAVLQSSGLYSLSSVVTVPSSSLGTQTYICNVNHKPSNTKVDKKVEPKSCDKTHTCPPCPAPELLGGPSVFLFPPKPKDTLMISRTPEVTCVVVDVSHEDPEVKFNWYVDGVEVHNAKTKPREEQYASTYRVVSVLTVLHQDWLNGKEYKCKVSNKALPAPIEKTISKAKGQPREPQVYTLPPSREEMTKNQVSLTCLVKGFYPSDIAVEWESNGQPENNYKTTPPVLDSDGSFFLYSKLTVDKSRWQQGNVFSCSVMHEALHNHYTQKSLSLSPGKGGGGSGGGGSGGGGSKESCDVQLYIKRQSEHSILAGDPFELECPVKYCANRPHVTWCKLNGTTCVKLEDRQTSWKEEKNISFFILHFEPVLPNDNGSYRCSANFQSNLIESHSTTLYVTDVKSASERPSKDEMASRPWLLYR

SEQ ID NO: 47 - protein, 699 aa, Homo sapiens
  misc_feature: Anti-CTLA-4 antibody (Ipilimumab) - CD226 ECD fusion protein
  misc_feature: Heavy chain = Anti-CTLA-4 heavy chain + CD226 ECD fusion sequence
QVQLVESGGGVVQPGRSLRLSCAASGFTFSSYTMHWVRQAPGKGLEWVTFISYDGNNKYYADSVKGRFTISRDNSKNTLYLQMNSLRAEDTAIYYCARTGWLGPFDYWGQGTLVTVSSASTKGPSVFPLAPSSKSTSGGTAALGCLVKDYFPEPVTVSWNSGALTSGVHTFPAVLQSSGLYSLSSVVTVPSSSLGTQTYICNVNHKPSNTKVDKRVEPKSCDKTHTCPPCPAPELLGGPSVFLFPPKPKDTLMISRTPEVTCVVVDVSHEDPEVKFNWYVDGVEVHNAKTKPREEQYNSTYRVVSVLTVLHQDWLNGKEYKCKVSNKALPAPIEKTISKAKGQPREPQVYTLPPSRDELTKNQVSLTCLVKGFYPSDIAVEWESNGQPENNYKTTPPVLDSDGSFFLYSKLTVDKSRWQQGNVFSCSVMHEALHNHYTQKSLSLSPGKGGGGSGGGGSGGGGSEEVLWHTSVPFAENMSLECVYPSMGILTQVEWFKIGTQQDSIAIFSPTHGMVIRKPYAERVYFLNSTMASNNMTLFFRNASEDDVGYYSCSLYTYPQGTWQKVIQVVQSDSFEAAVPSNSHIVSEPGKNVTLTCQPQMTWPVQAVRWEKIQPRQIDLLTYCNLVHGRNFTSKFPRQIVSNCSHGRWSVIVIPDVTVSDSGLYRCYLQASAGENETFVMRLTVAEGKTDNQYTLFVA

SEQ ID NO: 48 - protein, 698 aa, Homo sapiens
  misc_feature: Anti-PD-1 antibody (Pembrolizumab) - CD226 ECD antibody-ligand trap
  misc_feature: Heavy chain = Anti-PD-1 heavy chain + CD226 ECD fusion sequence
QVQLVQSGVEVKKPGASVKVSCKASGYTFTNYYMYWVRQAPGQGLEWMGGINPSNGGTNFNEKFKNRVTLTTDSSTTTAYMELKSLQFDDTAVYYCARRDYRFDMGFDYWGQGTTVTVSSASTKGPSVFPLAPCSRSTSESTAALGCLVKDYFPEPVTVSWNSGALTSGVHTFPAVLQSSGLYSLSSVVTVPSSSLGTKTYTCNVDHKPSNTKVDKRVESKYGPPCPPCPAPEFLGGPSVFLFPPKPKDTLMISRTPEVTCVVVDVSQEDPEVQFNWYVDGVEVHNAKTKPREEQFNSTYRVVSVLTVLHQDWLNGKEYKCKVSNKGLPSSIEKTISKAKGQPREPQVYTLPPSQEEMTKNQVSLTCLVKGFYPSDIAVEWESNGQPENNYKTTPPVLDSDGSFFLYSRLTVDKSRWQEGNVFSCSVMHEALHNHYTQKSLSLSLGKGGGGSGGGGSGGGGSEEVLWHTSVPFAENMSLECVYPSMGILTQVEWFKIGTQQDSIAIFSPTHGMVIRKPYAERVYFLNSTMASNNMTLFFRNASEDDVGYYSCSLYTYPQGTWQKVIQVVQSDSFEAAVPSNSHIVSEPGKNVTLTCQPQMTWPVQAVRWEKIQPRQIDLLTYCNLVHGRNFTSKFPRQIVSNCSHGRWSVIVIPDVTVSDSGLYRCYLQASAGENETFVMRLTVAEGKTDNQYTLFVA

SEQ ID NO: 49 - protein, 699 aa, Homo sapiens
  misc_feature: Anti-PD-L1 antibody- CD226 ECD fusion antibody-ligand trap
  misc_feature: Heavy chain = Anti-PD-L1 heavy chain + CD226 ECD fusion sequence
EVQLVESGGGLVQPGGSLRLSCAASGFTFSDSWIHWVRQAPGKGLEWVAWISPYGGSTYYADSVKGRFTISADTSKNTAYLQMNSLRAEDTAVYYCARRHWPGGFDYWGQGTLVTVSAASTKGPSVFPLAPSSKSTSGGTAALGCLVKDYFPEPVTVSWNSGALTSGVHTFPAVLQSSGLYSLSSVVTVPSSSLGTQTYICNVNHKPSNTKVDKKVEPKSCDKTHTCPPCPAPELLGGPSVFLFPPKPKDTLMISRTPEVTCVVVDVSHEDPEVKFNWYVDGVEVHNAKTKPREEQYASTYRVVSVLTVLHQDWLNGKEYKCKVSNKALPAPIEKTISKAKGQPREPQVYTLPPSREEMTKNQVSLTCLVKGFYPSDIAVEWESNGQPENNYKTTPPVLDSDGSFFLYSKLTVDKSRWQQGNVFSCSVMHEALHNHYTQKSLSLSPGKGGGGSGGGGSGGGGSEEVLWHTSVPFAENMSLECVYPSMGILTQVEWFKIGTQQDSIAIFSPTHGMVIRKPYAERVYFLNSTMASNNMTLFFRNASEDDVGYYSCSLYTYPQGTWQKVIQVVQSDSFEAAVPSNSHIVSEPGKNVTLTCQPQMTWPVQAVRWEKIQPRQIDLLTYCNLVHGRNFTSKFPRQIVSNCSHGRWSVIVIPDVTVSDSGLYRCYLQASAGENETFVMRLTVAEGKTDNQYTLFVA

SEQ ID NO: 50 - protein, 644 aa, Homo sapiens
  misc_feature: Anti-CTLA-4 antibody (Ipilimumab) - TIM-3 ECD fusion protein
  misc_feature: Heavy chain = Anti-CTLA-4 heavy chain + TIM-3 ECD fusion sequence
QVQLVESGGGVVQPGRSLRLSCAASGFTFSSYTMHWVRQAPGKGLEWVTFISYDGNNKYYADSVKGRFTISRDNSKNTLYLQMNSLRAEDTAIYYCARTGWLGPFDYWGQGTLVTVSSASTKGPSVFPLAPSSKSTSGGTAALGCLVKDYFPEPVTVSWNSGALTSGVHTFPAVLQSSGLYSLSSVVTVPSSSLGTQTYICNVNHKPSNTKVDKRVEPKSCDKTHTCPPCPAPELLGGPSVFLFPPKPKDTLMISRTPEVTCVVVDVSHEDPEVKFNWYVDGVEVHNAKTKPREEQYNSTYRVVSVLTVLHQDWLNGKEYKCKVSNKALPAPIEKTISKAKGQPREPQVYTLPPSRDELTKNQVSLTCLVKGFYPSDIAVEWESNGQPENNYKTTPPVLDSDGSFFLYSKLTVDKSRWQQGNVFSCSVMHEALHNHYTQKSLSLSPGKGGGGSGGGGSGGGGSSEVEYRAEVGQNAYLPCFYTPAAPGNLVPVCWGKGACPVFECGNVVLRTDERDVNYWTSRYWLNGDFRKGDVSLTIENVTLADSGIYCCRIQIPGIMNDEKFNLKLVIKPAKVTPAPTRQRDFTAAFPRMLTTRGHGPAETQTLGSLPDINLTQISTLANELRDSRLANDLRDSGATIRIG

SEQ ID NO: 51 - protein, 644 aa, Homo sapiens
  misc_feature: Anti-PD-L1 antibody- TIM3 ECD fusion antibody-ligand trap
  misc_feature: Heavy chain = Anti-PD-L1 heavy chain + TIM3 ECD fusion sequence
EVQLVESGGGLVQPGGSLRLSCAASGFTFSDSWIHWVRQAPGKGLEWVAWISPYGGSTYYADSVKGRFTISADTSKNTAYLQMNSLRAEDTAVYYCARRHWPGGFDYWGQGTLVTVSAASTKGPSVFPLAPSSKSTSGGTAALGCLVKDYFPEPVTVSWNSGALTSGVHTFPAVLQSSGLYSLSSVVTVPSSSLGTQTYICNVNHKPSNTKVDKKVEPKSCDKTHTCPPCPAPELLGGPSVFLFPPKPKDTLMISRTPEVTCVVVDVSHEDPEVKFNWYVDGVEVHNAKTKPREEQYASTYRVVSVLTVLHQDWLNGKEYKCKVSNKALPAPIEKTISKAKGQPREPQVYTLPPSREEMTKNQVSLTCLVKGFYPSDIAVEWESNGQPENNYKTTPPVLDSDGSFFLYSKLTVDKSRWQQGNVFSCSVMHEALHNHYTQKSLSLSPGKGGGGSGGGGSGGGGSSEVEYRAEVGQNAYLPCFYTPAAPGNLVPVCWGKGACPVFECGNVVLRTDERDVNYWTSRYWLNGDFRKGDVSLTIENVTLADSGIYCCRIQIPGIMNDEKFNLKLVIKPAKVTPAPTRQRDFTAAFPRMLTTRGHGPAETQTLGSLPDINLTQISTLANELRDSRLANDLRDSGATIRIG

SEQ ID NO: 52 - protein, 643 aa, Homo sapiens
  misc_feature: Anti-PD-1 antibody (Pembrolizumab) - TIM-3 ECD antibody-ligand trap
  misc_feature: Heavy chain = Anti-PD-1 heavy chain + TIM3 ECD fusion sequence
QVQLVQSGVEVKKPGASVKVSCKASGYTFTNYYMYWVRQAPGQGLEWMGGINPSNGGTNFNEKFKNRVTLTTDSSTTTAYMELKSLQFDDTAVYYCARRDYRFDMGFDYWGQGTTVTVSSASTKGPSVFPLAPCSRSTSESTAALGCLVKDYFPEPVTVSWNSGALTSGVHTFPAVLQSSGLYSLSSVVTVPSSSLGTKTYTCNVDHKPSNTKVDKRVESKYGPPCPPCPAPEFLGGPSVFLFPPKPKDTLMISRTPEVTCVVVDVSQEDPEVQFNWYVDGVEVHNAKTKPREEQFNSTYRVVSVLTVLHQDWLNGKEYKCKVSNKGLPSSIEKTISKAKGQPREPQVYTLPPSQEEMTKNQVSLTCLVKGFYPSDIAVEWESNGQPENNYKTTPPVLDSDGSFFLYSRLTVDKSRWQEGNVFSCSVMHEALHNHYTQKSLSLSLGKGGGGSGGGGSGGGGSSEVEYRAEVGQNAYLPCFYTPAAPGNLVPVCWGKGACPVFECGNVVLRTDERDVNYWTSRYWLNGDFRKGDVSLTIENVTLADSGIYCCRIQIPGIMNDEKFNLKLVIKPAKVTPAPTRQRDFTAAFPRMLTTRGHGPAETQTLGSLPDINLTQISTLANELRDSRLANDLRDSGATIRIG

SEQ ID NO: 53 - protein, 636 aa, Homo sapiens
  misc_feature: Anti-PD-1 antibody (Nivolumab) - TIM3 ECD antibody-ligand trap
  misc_feature: Heavy chain = Anti-PD-1 heavy chain + TIM3 ECD fusion sequence
QVQLVESGGGVVQPGRSLRLDCKASGITFSNSGMHWVRQAPGKGLEWVAVIWYDGSKRYYADSVKGRFTISRDNSKNTLFLQMNSLRAEDTAVYYCATNDDYWGQGTLVTVSSASTKGPSVFPLAPCSRSTSESTAALGCLVKDYFPEPVTVSWNSGALTSGVHTFPAVLQSSGLYSLSSVVTVPSSSLGTKTYTCNVDHKPSNTKVDKRVESKYGPPCPPCPAPEFLGGPSVFLFPPKPKDTLMISRTPEVTCVVVDVSQEDPEVQFNWYVDGVEVHNAKTKPREEQFNSTYRVVSVLTVLHQDWLNGKEYKCKVSNKGLPSSIEKTISKAKGQPREPQVYTLPPSQEEMTKNQVSLTCLVKGFYPSDIAVEWESNGQPENNYKTTPPVLDSDGSFFLYSRLTVDKSRWQEGNVFSCSVMHEALHNHYTQKSLSLSLGKGGGGSGGGGSGGGGSSEVEYRAEVGQNAYLPCFYTPAAPGNLVPVCWGKGACPVFECGNVVLRTDERDVNYWTSRYWLNGDFRKGDVSLTIENVTLADSGIYCCRIQIPGIMNDEKFNLKLVIKPAKVTPAPTRQRDFTAAFPRMLTTRGHGPAETQTLGSLPDINLTQISTLANELRDSRLANDLRDSGATIRIG

SEQ ID NO: 54 - protein, 416 aa, Homo sapiens
  misc_feature: Human VSIG8
MGVRGALHLLLVCLSPALLSAVRINGDGQEVMYLAEGDNVRLGCPYLLDPEDLGTNSLDIEWMQVNSEPSHRENVFLTYQDKRIGHGNLPHLQQRVRFAASDPSQYDASINLMNLQVSDTATYECRVKKTTMATRKVIVTVQARPAVPMCWTEGHMSKGNDVVLKCFANGGSQPLSYKWAKISGHSHPYRAGAYHSQHSFHSELSYQESFHSTINQGLGNGDLLLKGINADDDGLYQCTVANHVGYSVCVVEVKSDSQRVGMIVGAVLGSLLMLACLALGIWGLICCCCGGGGAGGARGAFGYGVGGGVGGGACGDLASEIRVDAEAPGCKASGRGSRVTHLLGYPTQNVSRSLRRKYAPPPCGGPEDVALVPRTASASCEAGPSPVYIKVKSAEPADCADCAQVEQRSCKDGLLV

SEQ ID NO: 55 - protein, 200 aa, Homo sapiens
  misc_feature: Human VSIG8 ECD
VRINGDGQEVMYLAEGDNVRLGCPYLLDPEDLGTNSLDIEWMQVNSEPSHRENVFLTYQDKRIGHGNLPHLQQRVRFAASDPSQYDASINLMNLQVSDTATYECRVKKTTMATRKVIVTVQARPAVPMCWTEGHMSKGNDVVLKCFANGGSQPLSYKWAKISGHSHPYRAGAYHSQHSFHSELSYQESFHSTINQGLGNG

SEQ ID NO: 56 - protein, 311 aa, Homo sapiens [sequence omitted]

SEQ ID NO: 57 - protein, 161 aa, Homo sapiens
  misc_feature: Human VISTA ECD
FKVATPYSLYVCPEGQNVTLTCRLLGPVDKGHDVTFYKTWYRSSRGEVQTCSERRPIRNLTFQDLHLHHGGHQAANTSHDLAQRHGLESASDHHGNFSITMRNLTLLDSGLYCCLVVEIRHHHSEHRVHGAMELQVQTGKDAPSNCVVYPSSSQESENITA

SEQ ID NO: 58 - protein, 663 aa, Homo sapiens
  misc_feature: Anti-CTLA-4 antibody (Ipilimumab) - VSIG8 ECD fusion protein
  misc_feature: Heavy chain = Anti-CTLA-4 heavy chain + VSIG8 ECD fusion sequence
QVQLVESGGGVVQPGRSLRLSCAASGFTFSSYTMHWVRQAPGKGLEWVTFISYDGNNKYYADSVKGRFTISRDNSKNTLYLQMNSLRAEDTAIYYCARTGWLGPFDYWGQGTLVTVSSASTKGPSVFPLAPSSKSTSGGTAALGCLVKDYFPEPVTVSWNSGALTSGVHTFPAVLQSSGLYSLSSVVTVPSSSLGTQTYICNVNHKPSNTKVDKRVEPKSCDKTHTCPPCPAPELLGGPSVFLFPPKPKDTLMISRTPEVTCVVVDVSHEDPEVKFNWYVDGVEVHNAKTKPREEQYNSTYRVVSVLTVLHQDWLNGKEYKCKVSNKALPAPIEKTISKAKGQPREPQVYTLPPSRDELTKNQVSLTCLVKGFYPSDIAVEWESNGQPENNYKTTPPVLDSDGSFFLYSKLTVDKSRWQQGNVFSCSVMHEALHNHYTQKSLSLSPGKGGGGSGGGGSGGGGSVRINGDGQEVMYLAEGDNVRLGCPYLLDPEDLGTNSLDIEWMQVNSEPSHRENVFLTYQDKRIGHGNLPHLQQRVRFAASDPSQYDASINLMNLQVSDTATYECRVKKTTMATRKVIVTVQARPAVPMCWTEGHMSKGNDVVLKCFANGGSQPLSYKWAKISGHSHPYRAGAYHSQHSFHSELSYQESFHSTINQGLGNG

SEQ ID NO: 59 - protein, 586 aa, Homo sapiens
  misc_feature: Anti-PD-1 antibody (Nivolumab) - VSIG8 ECD antibody-ligand trap:
  misc_feature: Heavy chain = Anti-PD-1 heavy chain + VSIG8 ECD fusion sequence
QVQLVESGGGVVQPGRSLRLDCKASGITFSNSGMHWVRQAPGKGLEWVAVIWYDGSKRYYADSVKGRFTISRDNSKNTLFLQMNSLRAEDTAVYYCATNDDYWGQGTLVTVSSASTKGPSVFPLAPCSRSTSESTAALGCLVKDYFPEPVTVSWNSGALTSGVHTFPAVLQSSGLYSLSSVVTVPSSSLGTKTYTCNVDHKPSNTKVDKRVESKYGPPCPPCPAPEFLGGPSVFLFPPKPKDTLMISRTPEVTCVVVDVSQEDPEVQFNWYVDGVEVHNAKTKPREEQFNSTYRVVSVLTVLHQDWLNGKEYKCKVSNKGLPSSIEKTISKAKGQPREPQVYTLPPSQEEMTKNQVSLTCLVKGFYPSDIAVEWESNGQPENNYKTTPPVLDSDGSFFLYSRLTVDKSRWQEGNVFSCSVMHEALHNHYTQKSLSLSLGKGGGGSGGGGSGGGGSVRINGDGQEVMYLAEGDNVRLGCPYLLDPEDLGTNSLDIEWMQVNSEPSHRENVFLTYQDKRIGHGNLPHLQQRVRFAASDPSQYDASINLMNLQVSDTATYECRVKKTTMATRKVIVTVQARPAVPMCWT

SEQ ID NO: 60 - protein, 645 aa, Homo sapiens
  misc_feature: Antibody (Tocilizumab) - TIM3 ECD antibody-ligand trap
  misc_feature: Anti-IL6R Antibody (Tocilizumab) heavy chain + TIM3 ECD
QVQLQESGPGLVRPSQTLSLTCTVSGYSITSDHAWSWVRQPPGRGLEWIGYISYSGITTYNPSLKSRVTMLRDTSKNQFSLRLSSVTAADTAVYYCARSLARTTAMDYWGQGSLVTVSSASTKGPSVFPLAPSSKSTSGGTAALGCLVKDYFPEPVTVSWNSGALTSGVHTFPAVLQSSGLYSLSSVVTVPSSSLGTQTYICNVNHKPSNTKVDKKVEPKSCDKTHTCPPCPAPELLGGPSVFLFPPKPKDTLMISRTPEVTCVVVDVSHEDPEVKFNWYVDGVEVHNAKTKPREEQYNSTYRVVSVLTVLHQDWLNGKEYKCKVSNKALPAPIEKTISKAKGQPREPQVYTLPPSRDELTKNQVSLTCLVKGFYPSDIAVEWESNGQPENNYKTTPPVLDSDGSFFLYSKLTVDKSRWQQGNVFSCSVMHEALHNHYTQKSLSLSPGKGGGGSGGGGSGGGGSSEVEYRAEVGQNAYLPCFYTPAAPGNLVPVCWGKGACPVFECGNVVLRTDERDVNYWTSRYWLNGDFRKGDVSLTIENVTLADSGIYCCRIQIPGIMNDEKFNLKLVIKPAKVTPAPTRQRDFTAAFPRMLTTRGHGPAETQTLGSLPDINLTQISTLANELRDSRLANDLRDSGATIRIG

SEQ ID NO: 61 - protein, 214 aa, Homo sapiens [sequence omitted]

SEQ ID NO: 62 - protein, 625 aa, Homo sapiens
  misc_feature: Anti-IL6R Antibody (Tocilizumab) - VISTA ECD antibody-ligand trap
  misc_feature: Anti-IL6R Antibody (Tocilizumab) heavy chain + VISTA ECD
QVQLQESGPGLVRPSQTLSLTCTVSGYSITSDHAWSWVRQPPGRGLEWIGYISYSGITTYNPSLKSRVTMLRDTSKNQFSLRLSSVTAADTAVYYCARSLARTTAMDYWGQGSLVTVSSASTKGPSVFPLAPSSKSTSGGTAALGCLVKDYFPEPVTVSWNSGALTSGVHTFPAVLQSSGLYSLSSVVTVPSSSLGTQTYICNVNHKPSNTKVDKKVEPKSCDKTHTCPPCPAPELLGGPSVFLFPPKPKDTLMISRTPEVTCVVVDVSHEDPEVKFNWYVDGVEVHNAKTKPREEQYNSTYRVVSVLTVLHQDWLNGKEYKCKVSNKALPAPIEKTISKAKGQPREPQVYTLPPSRDELTKNQVSLTCLVKGFYPSDIAVEWESNGQPENNYKTTPPVLDSDGSFFLYSKLTVDKSRWQQGNVFSCSVMHEALHNHYTQKSLSLSPGKGGGGSGGGGSGGGGSFKVATPYSLYVCPEGQNVTLTCRLLGPVDKGHDVTFYKTWYRSSRGEVQTCSERRPIRNLTFQDLHLHHGGHQAANTSHDLAQRHGLESASDHHGNFSITMRNLTLLDSGLYCCLVVEIRHHHSEHRVHGAMELQVQTGKDAPSNCVVYPSSSQESENITA

SEQ ID NO: 63 - protein, 214 aa, Homo sapiens [sequence omitted]

SEQ ID NO: 64 - protein, 664 aa, Homo sapiens
  misc_feature: Anti-IL6R Antibody (Tocilizumab) - VSIG8 ECD antibody-ligand trap
  misc_feature: Anti-IL6R Antibody (Tocilizumab) heavy chain + VSIG8 ECD
QVQLQESGPGLVRPSQTLSLTCTVSGYSITSDHAWSWVRQPPGRGLEWIGYISYSGITTYNPSLKSRVTMLRDTSKNQFSLRLSSVTAADTAVYYCARSLARTTAMDYWGQGSLVTVSSASTKGPSVFPLAPSSKSTSGGTAALGCLVKDYFPEPVTVSWNSGALTSGVHTFPAVLQSSGLYSLSSVVTVPSSSLGTQTYICNVNHKPSNTKVDKKVEPKSCDKTHTCPPCPAPELLGGPSVFLFPPKPKDTLMISRTPEVTCVVVDVSHEDPEVKFNWYVDGVEVHNAKTKPREEQYNSTYRVVSVLTVLHQDWLNGKEYKCKVSNKALPAPIEKTISKAKGQPREPQVYTLPPSRDELTKNQVSLTCLVKGFYPSDIAVEWESNGQPENNYKTTPPVLDSDGSFFLYSKLTVDKSRWQQGNVFSCSVMHEALHNHYTQKSLSLSPGKGGGGSGGGGSGGGGSVRINGDGQEVMYLAEGDNVRLGCPYLLDPEDLGTNSLDIEWMQVNSEPSHRENVFLTYQDKRIGHGNLPHLQQRVRFAASDPSQYDASINLMNLQVSDTATYECRVKKTTMATRKVIVTVQARPAVPMCWTEGHMSKGNDVVLKCFANGGSQPLSYKWAKISGHSHPYRAGAYHSQHSFHSELSYQESFHSTINQGLGNG

SEQ ID NO: 65 - protein, 214 aa, Homo sapiens [sequence omitted]

SEQ ID NO: 66 - protein, 664 aa, Homo sapiens
  misc_feature: Anti-IL6R Antibody (Tocilizumab) - CD44 ECD antibody-ligand trap
  misc_feature: Anti-IL6R Antibody (Tocilizumab) heavy chain + CD44 ECD
QVQLQESGPGLVRPSQTLSLTCTVSGYSITSDHAWSWVRQPPGRGLEWIGYISYSGITTYNPSLKSRVTMLRDTSKNQFSLRLSSVTAADTAVYYCARSLARTTAMDYWGQGSLVTVSSASTKGPSVFPLAPSSKSTSGGTAALGCLVKDYFPEPVTVSWNSGALTSGVHTFPAVLQSSGLYSLSSVVTVPSSSLGTQTYICNVNHKPSNTKVDKKVEPKSCDKTHTCPPCPAPELLGGPSVFLFPPKPKDTLMISRTPEVTCVVVDVSHEDPEVKFNWYVDGVEVHNAKTKPREEQYNSTYRVVSVLTVLHQDWLNGKEYKCKVSNKALPAPIEKTISKAKGQPREPQVYTLPPSRDELTKNQVSLTCLVKGFYPSDIAVEWESNGQPENNYKTTPPVLDSDGSFFLYSKLTVDKSRWQQGNVFSCSVMHEALHNHYTQKSLSLSPGKGGGGSGGGGSGGGGSQIDLNITCRFAGVFHVEKNGRYSISRTEAADLCKAFNSTLPTMAQMEKALSIGFETCRYGFIEGHVVIPRIHPNSICAANNTGVYILTSNTSQYDTYCFNASAPPEEDCTSVTDLPNAFDGPITITIVNRDGTRYVQKGEYRTNPEDIYPSNPTDDDVSSGSSSERSSTSGGYIFYTFSTVHPIPDEDSPWITDSTDRIP

SEQ ID NO: 67 - protein, 214 aa, Homo sapiens [sequence omitted]

SEQ ID NO: 68 - protein, 591 aa, Homo sapiens
  misc_feature: Anti-IL6R Antibody (Tocilizumab) - BTLA ECD antibody-ligand trap
  misc_feature: Anti-IL6R Antibody (Tocilizumab) heavy chain + BTLA ECD
QVQLQESGPGLVRPSQTLSLTCTVSGYSITSDHAWSWVRQPPGRGLEWIGYISYSGITTYNPSLKSRVTMLRDTSKNQFSLRLSSVTAADTAVYYCARSLARTTAMDYWGQGSLVTVSSASTKGPSVFPLAPSSKSTSGGTAALGCLVKDYFPEPVTVSWNSGALTSGVHTFPAVLQSSGLYSLSSVVTVPSSSLGTQTYICNVNHKPSNTKVDKKVEPKSCDKTHTCPPCPAPELLGGPSVFLFPPKPKDTLMISRTPEVTCVVVDVSHEDPEVKFNWYVDGVEVHNAKTKPREEQYNSTYRVVSVLTVLHQDWLNGKEYKCKVSNKALPAPIEKTISKAKGQPREPQVYTLPPSRDELTKNQVSLTCLVKGFYPSDIAVEWESNGQPENNYKTTPPVLDSDGSFFLYSKLTVDKSRWQQGNVFSCSVMHEALHNHYTQKSLSLSPGKGGGGSGGGGSGGGGSKESCDVQLYIKRQSEHSILAGDPFELECPVKYCANRPHVTWCKLNGTTCVKLEDRQTSWKEEKNISFFILHFEPVLPNDNGSYRCSANFQSNLIESHSTTLYVTDVKSASERPSKDEMASRPWLLYR

SEQ ID NO: 69 - protein, 214 aa, Homo sapiens [sequence omitted]

SEQ ID NO: 70 - protein, 700 aa, Homo sapiens
  misc_feature: Anti-IL6R Antibody (Tocilizumab) - CD226 ECD antibody-ligand trap
  misc_feature: Anti-IL6R Antibody (Tocilizumab) heavy chain + CD226 ECD
QVQLQESGPGLVRPSQTLSLTCTVSGYSITSDHAWSWVRQPPGRGLEWIGYISYSGITTYNPSLKSRVTMLRDTSKNQFSLRLSSVTAADTAVYYCARSLARTTAMDYWGQGSLVTVSSASTKGPSVFPLAPSSKSTSGGTAALGCLVKDYFPEPVTVSWNSGALTSGVHTFPAVLQSSGLYSLSSVVTVPSSSLGTQTYICNVNHKPSNTKVDKKVEPKSCDKTHTCPPCPAPELLGGPSVFLFPPKPKDTLMISRTPEVTCVVVDVSHEDPEVKFNWYVDGVEVHNAKTKPREEQYNSTYRVVSVLTVLHQDWLNGKEYKCKVSNKALPAPIEKTISKAKGQPREPQVYTLPPSRDELTKNQVSLTCLVKGFYPSDIAVEWESNGQPENNYKTTPPVLDSDGSFFLYSKLTVDKSRWQQGNVFSCSVMHEALHNHYTQKSLSLSPGKGGGGSGGGGSGGGGSEEVLWHTSVPFAENMSLECVYPSMGILTQVEWFKIGTQQDSIAIFSPTHGMVIRKPYAERVYFLNSTMASNNMTLFFRNASEDDVGYYSCSLYTYPQGTWQKVIQVVQSDSFEAAVPSNSHIVSEPGKNVTLTCQPQMTWPVQAVRWEKIQPRQIDLLTYCNLVHGRNFTSKFPRQIVSNCSHGRWSVIVIPDVTVSDSGLYRCYLQASAGENETFVMRLTVAEGKTDNQYTLFVA

SEQ ID NO: 71 - protein, 214 aa, Homo sapiens [sequence omitted]

SEQ ID NO: 72 - protein, 646 aa, Homo sapiens
  misc_feature: Anti-IL6R Antibody (Tocilizumab) - LIGHT ECD antibody-ligand trap
  misc_feature: Anti-IL6R Antibody (Tocilizumab) heavy chain + LIGHT ECD
QVQLQESGPGLVRPSQTLSLTCTVSGYSITSDHAWSWVRQPPGRGLEWIGYISYSGITTYNPSLKSRVTMLRDTSKNQFSLRLSSVTAADTAVYYCARSLARTTAMDYWGQGSLVTVSSASTKGPSVFPLAPSSKSTSGGTAALGCLVKDYFPEPVTVSWNSGALTSGVHTFPAVLQSSGLYSLSSVVTVPSSSLGTQTYICNVNHKPSNTKVDKKVEPKSCDKTHTCPPCPAPELLGGPSVFLFPPKPKDTLMISRTPEVTCVVVDVSHEDPEVKFNWYVDGVEVHNAKTKPREEQYNSTYRVVSVLTVLHQDWLNGKEYKCKVSNKALPAPIEKTISKAKGQPREPQVYTLPPSRDELTKNQVSLTCLVKGFYPSDIAVEWESNGQPENNYKTTPPVLDSDGSFFLYSKLTVDKSRWQQGNVFSCSVMHEALHNHYTQKSLSLSPGKGGGGSGGGGSGGGGSLQLHWRLGEMVTRLPDGPAGSWEQLIQERRSHEVNPAAHLTGANSSLTGSGGPLLWETQLGLAFLRGLSYHDGALVVTKAGYYYIYSKVQLGGVGCPLGLASTITHGLYKRTPRYPEELELLVSQQSPCGRATSSSRVWWDSSFLGGVVHLEAGEKVVVRVLDERLVRLRDGTRSYFGAFMV

SEQ ID NO: 73 - protein, 214 aa, Homo sapiens [sequence omitted]

SEQ ID NO: 74 - protein, 645 aa, Homo sapiens
  misc_feature: Anti-EGFR Antibody (Cetuximab) - TIM3 ECD antibody-ligand trap
  misc_feature: Anti-EGFR Antibody (Cetuximab) heavy chain + TIM3 ECD
QVQLKQSGPGLVQPSQSLSITCTVSGFSLTNYGVHWVRQSPGKGLEWLGVIWSGGNTDYNTPFTSRLSINKDNSKSQVFFKMNSLQSNDTAIYYCARALTYYDYEFAYWGQGTLVTVSAASTKGPSVFPLAPSSKSTSGGTAALGCLVKDYFPEPVTVSWNSGALTSGVHTFPAVLQSSGLYSLSSVVTVPSSSLGTQTYICNVNHKPSNTKVDKRVEPKSCDKTHTCPPCPAPELLGGPSVFLFPPKPKDTLMISRTPEVTCVVVDVSHEDPEVKFNWYVDGVEVHNAKTKPREEQYNSTYRVVSVLTVLHQDWLNGKEYKCKVSNKALPAPIEKTISKAKGQPREPQVYTLPPSRDELTKNQVSLTCLVKGFYPSDIAVEWESNGQPENNYKTTPPVLDSDGSFFLYSKLTVDKSRWQQGNVFSCSVMHEALHNHYTQKSLSLSPGKGGGGSGGGGSGGGGSSEVEYRAEVGQNAYLPCFYTPAAPGNLVPVCWGKGACPVFECGNVVLRTDERDVNYWTSRYWLNGDFRKGDVSLTIENVTLADSGIYCCRIQIPGIMNDEKFNLKLVIKPAKVTPAPTRQRDFTAAFPRMLTTRGHGPAETQTLGSLPDINLTQISTLANELRDSRLANDLRDSGATIRIG

SEQ ID NO: 75 - protein, 214 aa, Homo sapiens
  misc_feature: Anti-EGFR Antibody (Cetuximab) light chain
DILLTQSPVILSVSPGERVSFSCRASQSIGTNIHWYQQRTNGSPRLLIKYASESISGIPSRFSGSGSGTDFTLSINSVESEDIADYYCQQNNNWPTTFGAGTKLELKRTVAAPSVFIFPPSDEQLKSGTASVVCLLNNFYPREAKVQWKVDNALQSGNSQESVTEQDSKDSTYSLSSTLTLSKADYEKHKVYACEVTHQGLSSPVTKSFNRGEC

SEQ ID NO: 76 - protein, 625 aa, Homo sapiens
  misc_feature: Anti-EGFR Antibody (Cetuximab) - VISTA ECD antibody-ligand trap
  misc_feature: Anti-EGFR Antibody (Cetuximab) heavy chain + VISTA ECD
QVQLKQSGPGLVQPSQSLSITCTVSGFSLTNYGVHWVRQSPGKGLEWLGVIWSGGNTDYNTPFTSRLSINKDNSKSQVFFKMNSLQSNDTAIYYCARALTYYDYEFAYWGQGTLVTVSAASTKGPSVFPLAPSSKSTSGGTAALGCLVKDYFPEPVTVSWNSGALTSGVHTFPAVLQSSGLYSLSSVVTVPSSSLGTQTYICNVNHKPSNTKVDKRVEPKSCDKTHTCPPCPAPELLGGPSVFLFPPKPKDTLMISRTPEVTCVVVDVSHEDPEVKFNWYVDGVEVHNAKTKPREEQYNSTYRVVSVLTVLHQDWLNGKEYKCKVSNKALPAPIEKTISKAKGQPREPQVYTLPPSRDELTKNQVSLTCLVKGFYPSDIAVEWESNGQPENNYKTTPPVLDSDGSFFLYSKLTVDKSRWQQGNVFSCSVMHEALHNHYTQKSLSLSPGKGGGGSGGGGSGGGGSFKVATPYSLYVCPEGQNVTLTCRLLGPVDKGHDVTFYKTWYRSSRGEVQTCSERRPIRNLTFQDLHLHHGGHQAANTSHDLAQRHGLESASDHHGNFSITMRNLTLLDSGLYCCLVVEIRHHHSEHRVHGAMELQVQTGKDAPSNCVVYPSSSQESENITA

SEQ ID NO: 77 - protein, 214 aa, Homo sapiens; identical to SEQ ID NO: 75
  misc_feature: Anti-EGFR Antibody (Cetuximab) light chain

SEQ ID NO: 78 - protein, 664 aa, Homo sapiens
  misc_feature: Anti-EGFR Antibody (Cetuximab) - VSIG8 ECD antibody-ligand trap
  misc_feature: Anti-EGFR Antibody (Cetuximab) heavy chain + VSIG8 ECD
QVQLKQSGPGLVQPSQSLSITCTVSGFSLTNYGVHWVRQSPGKGLEWLGVIWSGGNTDYNTPFTSRLSINKDNSKSQVFFKMNSLQSNDTAIYYCARALTYYDYEFAYWGQGTLVTVSAASTKGPSVFPLAPSSKSTSGGTAALGCLVKDYFPEPVTVSWNSGALTSGVHTFPAVLQSSGLYSLSSVVTVPSSSLGTQTYICNVNHKPSNTKVDKRVEPKSCDKTHTCPPCPAPELLGGPSVFLFPPKPKDTLMISRTPEVTCVVVDVSHEDPEVKFNWYVDGVEVHNAKTKPREEQYNSTYRVVSVLTVLHQDWLNGKEYKCKVSNKALPAPIEKTISKAKGQPREPQVYTLPPSRDELTKNQVSLTCLVKGFYPSDIAVEWESNGQPENNYKTTPPVLDSDGSFFLYSKLTVDKSRWQQGNVFSCSVMHEALHNHYTQKSLSLSPGKGGGGSGGGGSGGGGSVRINGDGQEVMYLAEGDNVRLGCPYLLDPEDLGTNSLDIEWMQVNSEPSHRENVFLTYQDKRIGHGNLPHLQQRVRFAASDPSQYDASINLMNLQVSDTATYECRVKKTTMATRKVIVTVQARPAVPMCWTEGHMSKGNDVVLKCFANGGSQPLSYKWAKISGHSHPYRAGAYHSQHSFHSELSYQESFHSTINQGLGNG

SEQ ID NO: 79 - protein, 214 aa, Homo sapiens; identical to SEQ ID NO: 75
  misc_feature: Anti-EGFR Antibody (Cetuximab) light chain

SEQ ID NO: 80 - protein, 664 aa, Homo sapiens
  misc_feature: Anti-EGFR Antibody (Cetuximab) - CD44 ECD antibody-ligand trap
  misc_feature: Anti-EGFR Antibody (Cetuximab) heavy chain + CD44 ECD
QVQLKQSGPGLVQPSQSLSITCTVSGFSLTNYGVHWVRQSPGKGLEWLGVIWSGGNTDYNTPFTSRLSINKDNSKSQVFFKMNSLQSNDTAIYYCARALTYYDYEFAYWGQGTLVTVSAASTKGPSVFPLAPSSKSTSGGTAALGCLVKDYFPEPVTVSWNSGALTSGVHTFPAVLQSSGLYSLSSVVTVPSSSLGTQTYICNVNHKPSNTKVDKRVEPKSCDKTHTCPPCPAPELLGGPSVFLFPPKPKDTLMISRTPEVTCVVVDVSHEDPEVKFNWYVDGVEVHNAKTKPREEQYNSTYRVVSVLTVLHQDWLNGKEYKCKVSNKALPAPIEKTISKAKGQPREPQVYTLPPSRDELTKNQVSLTCLVKGFYPSDIAVEWESNGQPENNYKTTPPVLDSDGSFFLYSKLTVDKSRWQQGNVFSCSVMHEALHNHYTQKSLSLSPGKGGGGSGGGGSGGGGSQIDLNITCRFAGVFHVEKNGRYSISRTEAADLCKAFNSTLPTMAQMEKALSIGFETCRYGFIEGHVVIPRIHPNSICAANNTGVYILTSNTSQYDTYCFNASAPPEEDCTSVTDLPNAFDGPITITIVNRDGTRYVQKGEYRTNPEDIYPSNPTDDDVSSGSSSERSSTSGGYIFYTFSTVHPIPDEDSPWITDSTDRIP

SEQ ID NO: 81 - protein, 214 aa, Homo sapiens; identical to SEQ ID NO: 75
  misc_feature: Anti-EGFR Antibody (Cetuximab) light chain

SEQ ID NO: 82 - protein, 591 aa, Homo sapiens
  misc_feature: Anti-EGFR Antibody (Cetuximab) - BTLA ECD antibody-ligand trap
  misc_feature: Anti-EGFR Antibody (Cetuximab) heavy chain + BTLA ECD
QVQLKQSGPGLVQPSQSLSITCTVSGFSLTNYGVHWVRQSPGKGLEWLGVIWSGGNTDYNTPFTSRLSINKDNSKSQVFFKMNSLQSNDTAIYYCARALTYYDYEFAYWGQGTLVTVSAASTKGPSVFPLAPSSKSTSGGTAALGCLVKDYFPEPVTVSWNSGALTSGVHTFPAVLQSSGLYSLSSVVTVPSSSLGTQTYICNVNHKPSNTKVDKRVEPKSCDKTHTCPPCPAPELLGGPSVFLFPPKPKDTLMISRTPEVTCVVVDVSHEDPEVKFNWYVDGVEVHNAKTKPREEQYNSTYRVVSVLTVLHQDWLNGKEYKCKVSNKALPAPIEKTISKAKGQPREPQVYTLPPSRDELTKNQVSLTCLVKGFYPSDIAVEWESNGQPENNYKTTPPVLDSDGSFFLYSKLTVDKSRWQQGNVFSCSVMHEALHNHYTQKSLSLSPGKGGGGSGGGGSGGGGSKESCDVQLYIKRQSEHSILAGDPFELECPVKYCANRPHVTWCKLNGTTCVKLEDRQTSWKEEKNISFFILHFEPVLPNDNGSYRCSANFQSNLIESHSTTLYVTDVKSASERPSKDEMASRPWLLYR

SEQ ID NO: 83 - protein, 214 aa, Homo sapiens; identical to SEQ ID NO: 75
  misc_feature: Anti-EGFR Antibody (Cetuximab) light chain

SEQ ID NO: 84 - protein, 700 aa, Homo sapiens
  misc_feature: Anti-EGFR Antibody (Cetuximab) - CD226 ECD antibody-ligand trap
  misc_feature: Anti-EGFR Antibody (Cetuximab) heavy chain + CD226 ECD
QVQLKQSGPGLVQPSQSLSITCTVSGFSLTNYGVHWVRQSPGKGLEWLGVIWSGGNTDYNTPFTSRLSINKDNSKSQVFFKMNSLQSNDTAIYYCARALTYYDYEFAYWGQGTLVTVSAASTKGPSVFPLAPSSKSTSGGTAALGCLVKDYFPEPVTVSWNSGALTSGVHTFPAVLQSSGLYSLSSVVTVPSSSLGTQTYICNVNHKPSNTKVDKRVEPKSCDKTHTCPPCPAPELLGGPSVFLFPPKPKDTLMISRTPEVTCVVVDVSHEDPEVKFNWYVDGVEVHNAKTKPREEQYNSTYRVVSVLTVLHQDWLNGKEYKCKVSNKALPAPIEKTISKAKGQPREPQVYTLPPSRDELTKNQVSLTCLVKGFYPSDIAVEWESNGQPENNYKTTPPVLDSDGSFFLYSKLTVDKSRWQQGNVFSCSVMHEALHNHYTQKSLSLSPGKGGGGSGGGGSGGGGSEEVLWHTSVPFAENMSLECVYPSMGILTQVEWFKIGTQQDSIAIFSPTHGMVIRKPYAERVYFLNSTMASNNMTLFFRNASEDDVGYYSCSLYTYPQGTWQKVIQVVQSDSFEAAVPSNSHIVSEPGKNVTLTCQPQMTWPVQAVRWEKIQPRQIDLLTYCNLVHGRNFTSKFPRQIVSNCSHGRWSVIVIPDVTVSDSGLYRCYLQASAGENETFVMRLTVAEGKTDNQYTLFVA

SEQ ID NO: 85 - protein, 157 aa, Homo sapiens
  misc_feature: Anti-EGFR Antibody (Cetuximab) light chain
DILLTQSPVILSVSPGERVSFSCRASQSIGTNIHWYQQRTNGSPRLLIKYASESISGIPSRFSGSGSGTDFTLSINSVESEDIADYYCQQNNNWPTTFGAGTKLELKRTVAAPSVFIFPPSDEQLKSGTASVVCLLNNFYPREAKVQWKVDNALQSG

SEQ ID NO: 86 - protein, 646 aa, Homo sapiens
  misc_feature: Anti-EGFR Antibody (Cetuximab) - LIGHT ECD antibody-ligand trap
  misc_feature: Anti-EGFR Antibody (Cetuximab) heavy chain + LIGHT ECD
QVQLKQSGPGLVQPSQSLSITCTVSGFSLTNYGVHWVRQSPGKGLEWLGVIWSGGNTDYNTPFTSRLSINKDNSKSQVFFKMNSLQSNDTAIYYCARALTYYDYEFAYWGQGTLVTVSAASTKGPSVFPLAPSSKSTSGGTAALGCLVKDYFPEPVTVSWNSGALTSGVHTFPAVLQSSGLYSLSSVVTVPSSSLGTQTYICNVNHKPSNTKVDKRVEPKSCDKTHTCPPCPAPELLGGPSVFLFPPKPKDTLMISRTPEVTCVVVDVSHEDPEVKFNWYVDGVEVHNAKTKPREEQYNSTYRVVSVLTVLHQDWLNGKEYKCKVSNKALPAPIEKTISKAKGQPREPQVYTLPPSRDELTKNQVSLTCLVKGFYPSDIAVEWESNGQPENNYKTTPPVLDSDGSFFLYSKLTVDKSRWQQGNVFSCSVMHEALHNHYTQKSLSLSPGKGGGGSGGGGSGGGGSLQLHWRLGEMVTRLPDGPAGSWEQLIQERRSHEVNPAAHLTGANSSLTGSGGPLLWETQLGLAFLRGLSYHDGALVVTKAGYYYIYSKVQLGGVGCPLGLASTITHGLYKRTPRYPEELELLVSQQSPCGRATSSSRVWWDSSFLGGVVHLEAGEKVVVRVLDERLVRLRDGTRSYFGAFMV

SEQ ID NO: 87 - protein, 214 aa, Homo sapiens; identical to SEQ ID NO: 75
  misc_feature: Anti-EGFR Antibody (Cetuximab) light chain

SEQ ID NO: 88 - protein, 649 aa, Homo sapiens
  misc_feature: Anti-VEGF Antibody (Bevacizumab) - TIM3 ECD antibody-ligand trap
  misc_feature: Anti-VEGF Antibody (Bevacizumab) heavy chain + TIM3 ECD
EVQLVESGGGLVQPGGSLRLSCAASGYTFTNYGMNWVRQAPGKGLEWVGWINTYTGEPTYAADFKRRFTFSLDTSKSTAYLQMNSLRAEDTAVYYCAKYPHYYGSSHWYFDVWGQGTLVTVSSASTKGPSVFPLAPSSKSTSGGTAALGCLVKDYFPEPVTVSWNSGALTSGVHTFPAVLQSSGLYSLSSVVTVPSSSLGTQTYICNVNHKPSNTKVDKKVEPKSCDKTHTCPPCPAPELLGGPSVFLFPPKPKDTLMISRTPEVTCVVVDVSHEDPEVKFNWYVDGVEVHNAKTKPREEQYNSTYRVVSVLTVLHQDWLNGKEYKCKVSNKALPAPIEKTISKAKGQPREPQVYTLPPSREEMTKNQVSLTCLVKGFYPSDIAVEWESNGQPENNYKTTPPVLDSDGSFFLYSKLTVDKSRWQQGNVFSCSVMHEALHNHYTQKSLSLSPGKGGGGSGGGGSGGGGSSEVEYRAEVGQNAYLPCFYTPAAPGNLVPVCWGKGACPVFECGNVVLRTDERDVNYWTSRYWLNGDFRKGDVSLTIENVTLADSGIYCCRIQIPGIMNDEKFNLKLVIKPAKVTPAPTRQRDFTAAFPRMLTTRGHGPAETQTLGSLPDINLTQISTLANELRDSRLANDLRDSGATIRIG

SEQ ID NO: 89 - protein, 214 aa, Homo sapiens
  misc_feature: Anti-VEGF Antibody (Bevacizumab) light chain
DIQMTQSPSSLSASVGDRVTITCSASQDISNYLNWYQQKPGKAPKVLIYFTSSLHSGVPSRFSGSGSGTDFTLTISSLQPEDFATYYCQQYSTVPWTFGQGTKVEIKRTVAAPSVFIFPPSDEQLKSGTASVVCLLNNFYPREAKVQWKVDNALQSGNSQESVTEQDSKDSTYSLSSTLTLSKADYEKHKVYACEVTHQGLSSPVTKSFNRGEC

SEQ ID NO: 90 - protein, 629 aa, Homo sapiens
  misc_feature: Anti-VEGF Antibody (Bevacizumab) - VISTA ECD antibody-ligand trap
  misc_feature: Anti-VEGF Antibody (Bevacizumab) heavy chain + VISTA ECD
EVQLVESGGGLVQPGGSLRLSCAASGYTFTNYGMNWVRQAPGKGLEWVGWINTYTGEPTYAADFKRRFTFSLDTSKSTAYLQMNSLRAEDTAVYYCAKYPHYYGSSHWYFDVWGQGTLVTVSSASTKGPSVFPLAPSSKSTSGGTAALGCLVKDYFPEPVTVSWNSGALTSGVHTFPAVLQSSGLYSLSSVVTVPSSSLGTQTYICNVNHKPSNTKVDKKVEPKSCDKTHTCPPCPAPELLGGPSVFLFPPKPKDTLMISRTPEVTCVVVDVSHEDPEVKFNWYVDGVEVHNAKTKPREEQYNSTYRVVSVLTVLHQDWLNGKEYKCKVSNKALPAPIEKTISKAKGQPREPQVYTLPPSREEMTKNQVSLTCLVKGFYPSDIAVEWESNGQPENNYKTTPPVLDSDGSFFLYSKLTVDKSRWQQGNVFSCSVMHEALHNHYTQKSLSLSPGKGGGGSGGGGSGGGGSFKVATPYSLYVCPEGQNVTLTCRLLGPVDKGHDVTFYKTWYRSSRGEVQTCSERRPIRNLTFQDLHLHHGGHQAANTSHDLAQRHGLESASDHHGNFSITMRNLTLLDSGLYCCLVVEIRHHHSEHRVHGAMELQVQTGKDAPSNCVVYPSSSQESENITA

SEQ ID NO: 91 - protein, 214 aa, Homo sapiens; identical to SEQ ID NO: 89
  misc_feature: Anti-VEGF Antibody (Bevacizumab) light chain

SEQ ID NO: 92 - protein, 668 aa, Homo sapiens
  misc_feature: Anti-VEGF Antibody (Bevacizumab) - VSIG8 ECD antibody-ligand trap
  misc_feature: Anti-VEGF Antibody (Bevacizumab) heavy chain + VSIG8 ECD
EVQLVESGGGLVQPGGSLRLSCAASGYTFTNYGMNWVRQAPGKGLEWVGWINTYTGEPTYAADFKRRFTFSLDTSKSTAYLQMNSLRAEDTAVYYCAKYPHYYGSSHWYFDVWGQGTLVTVSSASTKGPSVFPLAPSSKSTSGGTAALGCLVKDYFPEPVTVSWNSGALTSGVHTFPAVLQSSGLYSLSSVVTVPSSSLGTQTYICNVNHKPSNTKVDKKVEPKSCDKTHTCPPCPAPELLGGPSVFLFPPKPKDTLMISRTPEVTCVVVDVSHEDPEVKFNWYVDGVEVHNAKTKPREEQYNSTYRVVSVLTVLHQDWLNGKEYKCKVSNKALPAPIEKTISKAKGQPREPQVYTLPPSREEMTKNQVSLTCLVKGFYPSDIAVEWESNGQPENNYKTTPPVLDSDGSFFLYSKLTVDKSRWQQGNVFSCSVMHEALHNHYTQKSLSLSPGKGGGGSGGGGSGGGGSVRINGDGQEVMYLAEGDNVRLGCPYLLDPEDLGTNSLDIEWMQVNSEPSHRENVFLTYQDKRIGHGNLPHLQQRVRFAASDPSQYDASINLMNLQVSDTATYECRVKKTTMATRKVIVTVQARPAVPMCWTEGHMSKGNDVVLKCFANGGSQPLSYKWAKISGHSHPYRAGAYHSQHSFHSELSYQESFHSTINQGLGNG

SEQ ID NO: 93 - protein, 214 aa, Homo sapiens; identical to SEQ ID NO: 89
  misc_feature: Anti-VEGF Antibody (Bevacizumab) light chain

SEQ ID NO: 94 - protein, 668 aa, Homo sapiens
  misc_feature: Anti-VEGF Antibody (Bevacizumab) - CD44 ECD antibody-ligand trap
  misc_feature: Anti-VEGF Antibody (Bevacizumab) heavy chain + CD44 ECD
EVQLVESGGGLVQPGGSLRLSCAASGYTFTNYGMNWVRQAPGKGLEWVGWINTYTGEPTYAADFKRRFTFSLDTSKSTAYLQMNSLRAEDTAVYYCAKYPHYYGSSHWYFDVWGQGTLVTVSSASTKGPSVFPLAPSSKSTSGGTAALGCLVKDYFPEPVTVSWNSGALTSGVHTFPAVLQSSGLYSLSSVVTVPSSSLGTQTYICNVNHKPSNTKVDKKVEPKSCDKTHTCPPCPAPELLGGPSVFLFPPKPKDTLMISRTPEVTCVVVDVSHEDPEVKFNWYVDGVEVHNAKTKPREEQYNSTYRVVSVLTVLHQDWLNGKEYKCKVSNKALPAPIEKTISKAKGQPREPQVYTLPPSREEMTKNQVSLTCLVKGFYPSDIAVEWESNGQPENNYKTTPPVLDSDGSFFLYSKLTVDKSRWQQGNVFSCSVMHEALHNHYTQKSLSLSPGKGGGGSGGGGSGGGGSQIDLNITCRFAGVFHVEKNGRYSISRTEAADLCKAFNSTLPTMAQMEKALSIGFETCRYGFIEGHVVIPRIHPNSICAANNTGVYILTSNTSQYDTYCFNASAPPEEDCTSVTDLPNAFDGPITITIVNRDGTRYVQKGEYRTNPEDIYPSNPTDDDVSSGSSSERSSTSGGYIFYTFSTVHPIPDEDSPWITDSTDRIP

SEQ ID NO: 95 - protein, 214 aa, Homo sapiens; identical to SEQ ID NO: 89
  misc_feature: Anti-VEGF Antibody (Bevacizumab) light chain

SEQ ID NO: 96 - protein, 595 aa, Homo sapiens
  misc_feature: Anti-VEGF Antibody (Bevacizumab) - BTLA ECD antibody-ligand trap
  misc_feature: Anti-VEGF Antibody (Bevacizumab) heavy chain + BTLA ECD
EVQLVESGGGLVQPGGSLRLSCAASGYTFTNYGMNWVRQAPGKGLEWVGWINTYTGEPTYAADFKRRFTFSLDTSKSTAYLQMNSLRAEDTAVYYCAKYPHYYGSSHWYFDVWGQGTLVTVSSASTKGPSVFPLAPSSKSTSGGTAALGCLVKDYFPEPVTVSWNSGALTSGVHTFPAVLQSSGLYSLSSVVTVPSSSLGTQTYICNVNHKPSNTKVDKKVEPKSCDKTHTCPPCPAPELLGGPSVFLFPPKPKDTLMISRTPEVTCVVVDVSHEDPEVKFNWYVDGVEVHNAKTKPREEQYNSTYRVVSVLTVLHQDWLNGKEYKCKVSNKALPAPIEKTISKAKGQPREPQVYTLPPSREEMTKNQVSLTCLVKGFYPSDIAVEWESNGQPENNYKTTPPVLDSDGSFFLYSKLTVDKSRWQQGNVFSCSVMHEALHNHYTQKSLSLSPGKGGGGSGGGGSGGGGSKESCDVQLYIKRQSEHSILAGDPFELECPVKYCANRPHVTWCKLNGTTCVKLEDRQTSWKEEKNISFFILHFEPVLPNDNGSYRCSANFQSNLIESHSTTLYVTDVKSASERPSKDEMASRPWLLYR

SEQ ID NO: 97 - protein, 214 aa, Homo sapiens; identical to SEQ ID NO: 89
  misc_feature: Anti-VEGF Antibody (Bevacizumab) light chain

SEQ ID NO: 98 - protein, 704 aa, Homo sapiens
  misc_feature: Anti-VEGF Antibody (Bevacizumab) - CD226 ECD antibody-ligand trap
  misc_feature: Anti-VEGF Antibody (Bevacizumab) heavy chain + CD226 ECD
EVQLVESGGGLVQPGGSLRLSCAASGYTFTNYGMNWVRQAPGKGLEWVGWINTYTGEPTYAADFKRRFTFSLDTSKSTAYLQMNSLRAEDTAVYYCAKYPHYYGSSHWYFDVWGQGTLVTVSSASTKGPSVFPLAPSSKSTSGGTAALGCLVKDYFPEPVTVSWNSGALTSGVHTFPAVLQSSGLYSLSSVVTVPSSSLGTQTYICNVNHKPSNTKVDKKVEPKSCDKTHTCPPCPAPELLGGPSVFLFPPKPKDTLMISRTPEVTCVVVDVSHEDPEVKFNWYVDGVEVHNAKTKPREEQYNSTYRVVSVLTVLHQDWLNGKEYKCKVSNKALPAPIEKTISKAKGQPREPQVYTLPPSREEMTKNQVSLTCLVKGFYPSDIAVEWESNGQPENNYKTTPPVLDSDGSFFLYSKLTVDKSRWQQGNVFSCSVMHEALHNHYTQKSLSLSPGKGGGGSGGGGSGGGGSEEVLWHTSVPFAENMSLECVYPSMGILTQVEWFKIGTQQDSIAIFSPTHGMVIRKPYAERVYFLNSTMASNNMTLFFRNASEDDVGYYSCSLYTYPQGTWQKVIQVVQSDSFEAAVPSNSHIVSEPGKNVTLTCQPQMTWPVQAVRWEKIQPRQIDLLTYCNLVHGRNFTSKFPRQIVSNCSHGRWSVIVIPDVTVSDSGLYRCYLQASAGENETFVMRLTVAEGKTDNQYTLFVA

SEQ ID NO: 99 - protein, 214 aa, Homo sapiens; identical to SEQ ID NO: 89
  misc_feature: Anti-VEGF Antibody (Bevacizumab) light chain

SEQ ID NO: 100 - protein, 650 aa, Homo sapiens
  misc_feature: Anti-VEGF Antibody (Bevacizumab) - LIGHT ECD antibody-ligand trap
  misc_feature: Anti-VEGF Antibody (Bevacizumab) heavy chain + LIGHT ECD
EVQLVESGGGLVQPGGSLRLSCAASGYTFTNYGMNWVRQAPGKGLEWVGWINTYTGEPTYAADFKRRFTFSLDTSKSTAYLQMNSLRAEDTAVYYCAKYPHYYGSSHWYFDVWGQGTLVTVSSASTKGPSVFPLAPSSKSTSGGTAALGCLVKDYFPEPVTVSWNSGALTSGVHTFPAVLQSSGLYSLSSVVTVPSSSLGTQTYICNVNHKPSNTKVDKKVEPKSCDKTHTCPPCPAPELLGGPSVFLFPPKPKDTLMISRTPEVTCVVVDVSHEDPEVKFNWYVDGVEVHNAKTKPREEQYNSTYRVVSVLTVLHQDWLNGKEYKCKVSNKALPAPIEKTISKAKGQPREPQVYTLPPSREEMTKNQVSLTCLVKGFYPSDIAVEWESNGQPENNYKTTPPVLDSDGSFFLYSKLTVDKSRWQQGNVFSCSVMHEALHNHYTQKSLSLSPGKGGGGSGGGGSGGGGSLQLHWRLGEMVTRLPDGPAGSWEQLIQERRSHEVNPAAHLTGANSSLTGSGGPLLWETQLGLAFLRGLSYHDGALVVTKAGYYYIYSKVQLGGVGCPLGLASTITHGLYKRTPRYPEELELLVSQQSPCGRATSSSRVWWDSSFLGGVVHLEAGEKVVVRVLDERLVRLRDGTRSYFGAFMV

SEQ ID NO: 101 - protein, 214 aa, Homo sapiens; identical to SEQ ID NO: 89
  misc_feature: Anti-VEGF Antibody (Bevacizumab) light chain

SEQ ID NO: 102 - protein, 646 aa, Homo sapiens
  misc_feature: Anti-HER2 Antibody (Trastuzumab) - TIM3 ECD antibody-ligand trap
  misc_feature: Anti-HER2 Antibody (Trastuzumab) heavy chain + TIM3 ECD
EVQLVESGGGLVQPGGSLRLSCAASGFNIKDTYIHWVRQAPGKGLEWVARIYPTNGYTRYADSVKGRFTISADTSKNTAYLQMNSLRAEDTAVYYCSRWGGDGFYAMDYWGQGTLVTVSSASTKGPSVFPLAPSSKSTSGGTAALGCLVKDYFPEPVTVSWNSGALTSGVHTFPAVLQSSGLYSLSSVVTVPSSSLGTQTYICNVNHKPSNTKVDKKVEPKSCDKTHTCPPCPAPELLGGPSVFLFPPKPKDTLMISRTPEVTCVVVDVSHEDPEVKFNWYVDGVEVHNAKTKPREEQYNSTYRVVSVLTVLHQDWLNGKEYKCKVSNKALPAPIEKTISKAKGQPREPQVYTLPPSREEMTKNQVSLTCLVKGFYPSDIAVEWESNGQPENNYKTTPPVLDSDGSFFLYSKLTVDKSRWQQGNVFSCSVMHEALHNHYTQKSLSLSPGKGGGGSGGGGSGGGGSSEVEYRAEVGQNAYLPCFYTPAAPGNLVPVCWGKGACPVFECGNVVLRTDERDVNYWTSRYWLNGDFRKGDVSLTIENVTLADSGIYCCRIQIPGIMNDEKFNLKLVIKPAKVTPAPTRQRDFTAAFPRMLTTRGHGPAETQTLGSLPDINLTQISTLANELRDSRLANDLRDSGATIRIG

SEQ ID NO: 103 - protein, 214 aa, Homo sapiens
  misc_feature: Anti-HER2 Antibody (Trastuzumab) light chain
DIQMTQSPSSLSASVGDRVTITCRASQDVNTAVAWYQQKPGKAPKLLIYSASFLYSGVPSRFSGSRSGTDFTLTISSLQPEDFATYYCQQHYTTPPTFGQGTKVEIKRTVAAPSVFIFPPSDEQLKSGTASVVCLLNNFYPREAKVQWKVDNALQSGNSQESVTEQDSKDSTYSLSSTLTLSKADYEKHKVYACEVTHQGLSSPVTKSFNRGEC

SEQ ID NO: 104 - protein, 626 aa, Homo sapiens
  misc_feature: Anti-HER2 Antibody (Trastuzumab) - VISTA ECD antibody-ligand trap
  misc_feature: Anti-HER2 Antibody (Trastuzumab) heavy chain + VISTA ECD
EVQLVESGGGLVQPGGSLRLSCAASGFNIKDTYIHWVRQAPGKGLEWVARIYPTNGYTRYADSVKGRFTISADTSKNTAYLQMNSLRAEDTAVYYCSRWGGDGFYAMDYWGQGTLVTVSSASTKGPSVFPLAPSSKSTSGGTAALGCLVKDYFPEPVTVSWNSGALTSGVHTFPAVLQSSGLYSLSSVVTVPSSSLGTQTYICNVNHKPSNTKVDKKVEPKSCDKTHTCPPCPAPELLGGPSVFLFPPKPKDTLMISRTPEVTCVVVDVSHEDPEVKFNWYVDGVEVHNAKTKPREEQYNSTYRVVSVLTVLHQDWLNGKEYKCKVSNKALPAPIEKTISKAKGQPREPQVYTLPPSREEMTKNQVSLTCLVKGFYPSDIAVEWESNGQPENNYKTTPPVLDSDGSFFLYSKLTVDKSRWQQGNVFSCSVMHEALHNHYTQKSLSLSPGKGGGGSGGGGSGGGGSFKVATPYSLYVCPEGQNVTLTCRLLGPVDKGHDVTFYKTWYRSSRGEVQTCSERRPIRNLTFQDLHLHHGGHQAANTSHDLAQRHGLESASDHHGNFSITMRNLTLLDSGLYCCLVVEIRHHHSEHRVHGAMELQVQTGKDAPSNCVVYPSSSQESENITA

SEQ ID NO: 105 - protein, 214 aa, Homo sapiens; identical to SEQ ID NO: 103
  misc_feature: Anti-HER2 Antibody (Trastuzumab) light chain

SEQ ID NO: 106 - protein, 608 aa, Homo sapiens
  misc_feature: Anti-HER2 Antibody (Trastuzumab) - VSIG8 ECD antibody-ligand trap
  misc_feature: Anti-HER2 Antibody (Trastuzumab) heavy chain + VSIG8 ECD
EVQLVESGGGLVQPGGSLRLSCAASGFNIKDTYIHWVRQAPGKGLEWVARIYPTNGYTRYADSVKGRFTISADTSKNTAYLQMNSLRAEDTAVYYCSRWGGDGFYAMDYWGQGTLVTVSSASTKGPSVFPLAPSSKSTSGGTAALGCLVKDYFPEPVTVSWNSGALTSGVHTFPAVLQSSGLYSLSSVVTVPSSSLGTQTYICNVNHKPSNTKVDKKVEPKSCDKTHTCPPCPAPELLGGPSVFLFPPKPKDTLMISRTPEVTCVVVDVSHEDPEVKFNWYVDGVEVHNAKTKPREEQYNSTYRVVSVLTVLHQDWLNGKEYKCKVSNKALPAPIEKTISKAKGQPREPQVYTLPPSREEMTKNQVSLTCLVKGFYPSDIAVEWESNGQPENNYKTTPPVLDSDGSFFLYSKLTVDKSRWQQGNVFSCSVMHEALHNHYTQKSLSLSPGKGGGGSGGGGSGGGGSVRINGDGQEVMYLAEGDNVRLGCPYLLDPEDLGTNSLDIEWMQVNSEPSHRENVFLTYQDKRIGHGNLPHLQQRVRFAASDPSQYDASINLMNLQVSDTATYECRVKKTTMATRKVIVTVQARPAVPMCWTEGHMSKGNDVVL

SEQ ID NO: 107 - protein, 214 aa, Homo sapiens; identical to SEQ ID NO: 103
  misc_feature: Anti-HER2 Antibody (Trastuzumab) light chain

SEQ ID NO: 108 - protein, 665 aa, Homo sapiens
  misc_feature: Anti-HER2 Antibody (Trastuzumab) - CD44 ECD antibody-ligand trap
  misc_feature: Anti-HER2 Antibody (Trastuzumab) heavy chain + CD44 ECD
EVQLVESGGGLVQPGGSLRLSCAASGFNIKDTYIHWVRQAPGKGLEWVARIYPTNGYTRYADSVKGRFTISADTSKNTAYLQMNSLRAEDTAVYYCSRWGGDGFYAMDYWGQGTLVTVSSASTKGPSVFPLAPSSKSTSGGTAALGCLVKDYFPEPVTVSWNSGALTSGVHTFPAVLQSSGLYSLSSVVTVPSSSLGTQTYICNVNHKPSNTKVDKKVEPKSCDKTHTCPPCPAPELLGGPSVFLFPPKPKDTLMISRTPEVTCVVVDVSHEDPEVKFNWYVDGVEVHNAKTKPREEQYNSTYRVVSVLTVLHQDWLNGKEYKCKVSNKALPAPIEKTISKAKGQPREPQVYTLPPSREEMTKNQVSLTCLVKGFYPSDIAVEWESNGQPENNYKTTPPVLDSDGSFFLYSKLTVDKSRWQQGNVFSCSVMHEALHNHYTQKSLSLSPGKGGGGSGGGGSGGGGSQIDLNITCRFAGVFHVEKNGRYSISRTEAADLCKAFNSTLPTMAQMEKALSIGFETCRYGFIEGHVVIPRIHPNSICAANNTGVYILTSNTSQYDTYCFNASAPPEEDCTSVTDLPNAFDGPITITIVNRDGTRYVQKGEYRTNPEDIYPSNPTDDDVSSGSSSERSSTSGGYIFYTFSTVHPIPDEDSPWITDSTDRIP

SEQ ID NO: 109 - protein, 214 aa, Homo sapiens; identical to SEQ ID NO: 103
  misc_feature: Anti-HER2 Antibody (Trastuzumab) light chain

SEQ ID NO: 110 - protein, 592 aa, Homo sapiens
  misc_feature: Anti-HER2 Antibody (Trastuzumab) - BTLA ECD antibody-ligand trap
  misc_feature: Anti-HER2 Antibody (Trastuzumab) heavy chain + BTLA ECD
EVQLVESGGGLVQPGGSLRLSCAASGFNIKDTYIHWVRQAPGKGLEWVARIYPTNGYTRYADSVKGRFTISADTSKNTAYLQMNSLRAEDTAVYYCSRWGGDGFYAMDYWGQGTLVTVSSASTKGPSVFPLAPSSKSTSGGTAALGCLVKDYFPEPVTVSWNSGALTSGVHTFPAVLQSSGLYSLSSVVTVPSSSLGTQTYICNVNHKPSNTKVDKKVEPKSCDKTHTCPPCPAPELLGGPSVFLFPPKPKDTLMISRTPEVTCVVVDVSHEDPEVKFNWYVDGVEVHNAKTKPREEQYNSTYRVVSVLTVLHQDWLNGKEYKCKVSNKALPAPIEKTISKAKGQPREPQVYTLPPSREEMTKNQVSLTCLVKGFYPSDIAVEWESNGQPENNYKTTPPVLDSDGSFFLYSKLTVDKSRWQQGNVFSCSVMHEALHNHYTQKSLSLSPGKGGGGSGGGGSGGGGSKESCDVQLYIKRQSEHSILAGDPFELECPVKYCANRPHVTWCKLNGTTCVKLEDRQTSWKEEKNISFFILHFEPVLPNDNGSYRCSANFQSNLIESHSTTLYVTDVKSASERPSKDEMASRPWLLYR

SEQ ID NO: 111 - protein, 214 aa, Homo sapiens; identical to SEQ ID NO: 103
  misc_feature: Anti-HER2 Antibody (Trastuzumab) light chain

SEQ ID NO: 112 - protein, 701 aa, Homo sapiens
  misc_feature: Anti-HER2 Antibody (Trastuzumab) - CD226 ECD antibody-ligand trap
  misc_feature: Anti-HER2 Antibody (Trastuzumab) heavy chain + CD226 ECD
EVQLVESGGGLVQPGGSLRLSCAASGFNIKDTYIHWVRQAPGKGLEWVARIYPTNGYTRYADSVKGRFTISADTSKNTAYLQMNSLRAEDTAVYYCSRWGGDGFYAMDYWGQGTLVTVSSASTKGPSVFPLAPSSKSTSGGTAALGCLVKDYFPEPVTVSWNSGALTSGVHTFPAVLQSSGLYSLSSVVTVPSSSLGTQTYICNVNHKPSNTKVDKKVEPKSCDKTHTCPPCPAPELLGGPSVFLFPPKPKDTLMISRTPEVTCVVVDVSHEDPEVKFNWYVDGVEVHNAKTKPREEQYNSTYRVVSVLTVLHQDWLNGKEYKCKVSNKALPAPIEKTISKAKGQPREPQVYTLPPSREEMTKNQVSLTCLVKGFYPSDIAVEWESNGQPENNYKTTPPVLDSDGSFFLYSKLTVDKSRWQQGNVFSCSVMHEALHNHYTQKSLSLSPGKGGGGSGGGGSGGGGSEEVLWHTSVPFAENMSLECVYPSMGILTQVEWFKIGTQQDSIAIFSPTHGMVIRKPYAERVYFLNSTMASNNMTLFFRNASEDDVGYYSCSLYTYPQGTWQKVIQVVQSDSFEAAVPSNSHIVSEPGKNVTLTCQPQMTWPVQAVRWEKIQPRQIDLLTYCNLVHGRNFTSKFPRQIVSNCSHGRWSVIVIPDVTVSDSGLYRCYLQASAGENETFVMRLTVAEGKTDNQYTLFVA

SEQ ID NO: 113 - protein, 214 aa, Homo sapiens; identical to SEQ ID NO: 103
  misc_feature: Anti-HER2 Antibody (Trastuzumab) light chain

SEQ ID NO: 114 - protein, 647 aa, Homo sapiens
  misc_feature: Anti-HER2 Antibody (Trastuzumab) - LIGHT ECD antibody-ligand trap
  misc_feature: Anti-HER2 Antibody (Trastuzumab) heavy chain + LIGHT ECD
EVQLVESGGGLVQPGGSLRLSCAASGFNIKDTYIHWVRQAPGKGLEWVARIYPTNGYTRYADSVKGRFTISADTSKNTAYLQMNSLRAEDTAVYYCSRWGGDGFYAMDYWGQGTLVTVSSASTKGPSVFPLAPSSKSTSGGTAALGCLVKDYFPEPVTVSWNSGALTSGVHTFPAVLQSSGLYSLSSVVTVPSSSLGTQTYICNVNHKPSNTKVDKKVEPKSCDKTHTCPPCPAPELLGGPSVFLFPPKPKDTLMISRTPEVTCVVVDVSHEDPEVKFNWYVDGVEVHNAKTKPREEQYNSTYRVVSVLTVLHQDWLNGKEYKCKVSNKALPAPIEKTISKAKGQPREPQVYTLPPSREEMTKNQVSLTCLVKGFYPSDIAVEWESNGQPENNYKTTPPVLDSDGSFFLYSKLTVDKSRWQQGNVFSCSVMHEALHNHYTQKSLSLSPGKGGGGSGGGGSGGGGSLQLHWRLGEMVTRLPDGPAGSWEQLIQERRSHEVNPAAHLTGANSSLTGSGGPLLWETQLGLAFLRGLSYHDGALVVTKAGYYYIYSKVQLGGVGCPLGLASTITHGLYKRTPRYPEELELLVSQQSPCGRATSSSRVWWDSSFLGGVVHLEAGEKVVVRVLDERLVRLRDGTRSYFGAFMV

SEQ ID NO: 115 - protein, 214 aa, Homo sapiens; identical to SEQ ID NO: 103
  misc_feature: Anti-HER2 Antibody (Trastuzumab) light chain

SEQ ID NO: 116 - protein, 644 aa, Homo sapiens
  misc_feature: Anti-41BB Antibody (Urelumab) - TIM3 ECD antibody-ligand trap
  misc_feature: Anti-41BB Antibody (Urelumab) heavy chain + TIM3 ECD
QVQLQQWGAGLLKPSETLSLTCAVYGGSFSGYYWSWIRQSPEKGLEWIGEINHGGYVTYNPSLESRVTISVDTSKNQFSLKLSSVTAADTAVYYCARDYGPGNYDWYFDLWGRGTLVTVSSASTKGPSVFPLAPCSRSTSESTAALGCLVKDYFPEPVTVSWNSGALTSGVHTFPAVLQSSGLYSLSSVVTVPSSSLGTKTYTCNVDHKPSNTKVDKRVESKYGPPCPPCPAPEFLGGPSVFLFPPKPKDTLMISRTPEVTCVVVDVSQEDPEVQFNWYVDGVEVHNAKTKPREEQFNSTYRVVSVLTVLHQDWLNGKEYKCKVSNKGLPSSIEKTISKAKGQPREPQVYTLPPSQEEMTKNQVSLTCLVKGFYPSDIAVEWESNGQPENNYKTTPPVLDSDGSFFLYSRLTVDKSRWQEGNVFSCSVMHEALHNHYTQKSLSLSLGKGGGGSGGGGSGGGGSSEVEYRAEVGQNAYLPCFYTPAAPGNLVPVCWGKGACPVFECGNVVLRTDERDVNYWTSRYWLNGDFRKGDVSLTIENVTLADSGIYCCRIQIPGIMNDEKFNLKLVIKPAKVTPAPTRQRDFTAAFPRMLTTRGHGPAETQTLGSLPDINLTQISTLANELRDSRLANDLRDSGATIRIG

SEQ ID NO: 117 - protein, 216 aa, Homo sapiens
  misc_feature: Anti-41BB Antibody (Urelumab) light chain
EIVLTQSPATLSLSPGERATLSCRASQSVSSYLAWYQQKPGQAPRLLIYDASNRATGIPARFSGSGSGTDFTLTISSLEPEDFAVYYCQQRSNWPPALTFCGGTKVEIKRTVAAPSVFIFPPSDEQLKSGTASVVCLLNNFYPREAKVQWKVDNALQSGNSQESVTEQDSKDSTYSLSSTLTLSKADYEKHKVYACEVTHQGLSSPVTKSFNRGEC

SEQ ID NO: 118 - protein, 624 aa, Homo sapiens
  misc_feature: Anti-41BB Antibody (Urelumab) - VISTA ECD antibody-ligand trap
  misc_feature: Anti-41BB Antibody (Urelumab) heavy chain + VISTA ECD
QVQLQQWGAGLLKPSETLSLTCAVYGGSFSGYYWSWIRQSPEKGLEWIGEINHGGYVTYNPSLESRVTISVDTSKNQFSLKLSSVTAADTAVYYCARDYGPGNYDWYFDLWGRGTLVTVSSASTKGPSVFPLAPCSRSTSESTAALGCLVKDYFPEPVTVSWNSGALTSGVHTFPAVLQSSGLYSLSSVVTVPSSSLGTKTYTCNVDHKPSNTKVDKRVESKYGPPCPPCPAPEFLGGPSVFLFPPKPKDTLMISRTPEVTCVVVDVSQEDPEVQFNWYVDGVEVHNAKTKPREEQFNSTYRVVSVLTVLHQDWLNGKEYKCKVSNKGLPSSIEKTISKAKGQPREPQVYTLPPSQEEMTKNQVSLTCLVKGFYPSDIAVEWESNGQPENNYKTTPPVLDSDGSFFLYSRLTVDKSRWQEGNVFSCSVMHEALHNHYTQKSLSLSLGKGGGGSGGGGSGGGGSFKVATPYSLYVCPEGQNVTLTCRLLGPVDKGHDVTFYKTWYRSSRGEVQTCSERRPIRNLTFQDLHLHHGGHQAANTSHDLAQRHGLESASDHHGNFSITMRNLTLLDSGLYCCLVVEIRHHHSEHRVHGAMELQVQTGKDAPSNCVVYPSSSQESENITA

SEQ ID NO: 119 - protein, 216 aa, Homo sapiens; identical to SEQ ID NO: 117
  misc_feature: Anti-41BB Antibody (Urelumab) light chain

SEQ ID NO: 120 - protein, 663 aa, Homo sapiens
  misc_feature: Anti-41BB Antibody (Urelumab) - VSIG8 ECD antibody-ligand trap
  misc_feature: Anti-41BB Antibody (Urelumab) heavy chain + VSIG8 ECD
QVQLQQWGAGLLKPSETLSLTCAVYGGSFSGYYWSWIRQSPEKGLEWIGEINHGGYVTYNPSLESRVTISVDTSKNQFSLKLSSVTAADTAVYYCARDYGPGNYDWYFDLWGRGTLVTVSSASTKGPSVFPLAPCSRSTSESTAALGCLVKDYFPEPVTVSWNSGALTSGVHTFPAVLQSSGLYSLSSVVTVPSSSLGTKTYTCNVDHKPSNTKVDKRVESKYGPPCPPCPAPEFLGGPSVFLFPPKPKDTLMISRTPEVTCVVVDVSQEDPEVQFNWYVDGVEVHNAKTKPREEQFNSTYRVVSVLTVLHQDWLNGKEYKCKVSNKGLPSSIEKTISKAKGQPREPQVYTLPPSQEEMTKNQVSLTCLVKGFYPSDIAVEWESNGQPENNYKTTPPVLDSDGSFFLYSRLTVDKSRWQEGNVFSCSVMHEALHNHYTQKSLSLSLGKGGGGSGGGGSGGGGSVRINGDGQEVMYLAEGDNVRLGCPYLLDPEDLGTNSLDIEWMQVNSEPSHRENVFLTYQDKRIGHGNLPHLQQRVRFAASDPSQYDASINLMNLQVSDTATYECRVKKTTMATRKVIVTVQARPAVPMCWTEGHMSKGNDVVLKCFANGGSQPLSYKWAKISGHSHPYRAGAYHSQHSFHSELSYQESFHSTINQGLGNG

SEQ ID NO: 121 - protein, 216 aa, Homo sapiens; identical to SEQ ID NO: 117
  misc_feature: Anti-41BB Antibody (Urelumab) light chain

SEQ ID NO: 122 - protein, 663 aa, Homo sapiens
  misc_feature: Anti-41BB Antibody (Urelumab) - CD44 ECD antibody-ligand trap
  misc_feature: Anti-41BB Antibody (Urelumab) heavy chain + CD44 ECD
QVQLQQWGAGLLKPSETLSLTCAVYGGSFSGYYWSWIRQSPEKGLEWIGEINHGGYVTYNPSLESRVTISVDTSKNQFSLKLSSVTAADTAVYYCARDYGPGNYDWYFDLWGRGTLVTVSSASTKGPSVFPLAPCSRSTSESTAALGCLVKDYFPEPVTVSWNSGALTSGVHTFPAVLQSSGLYSLSSVVTVPSSSLGTKTYTCNVDHKPSNTKVDKRVESKYGPPCPPCPAPEFLGGPSVFLFPPKPKDTLMISRTPEVTCVVVDVSQEDPEVQFNWYVDGVEVHNAKTKPREEQFNSTYRVVSVLTVLHQDWLNGKEYKCKVSNKGLPSSIEKTISKAKGQPREPQVYTLPPSQEEMTKNQVSLTCLVKGFYPSDIAVEWESNGQPENNYKTTPPVLDSDGSFFLYSRLTVDKSRWQEGNVFSCSVMHEALHNHYTQKSLSLSLGKGGGGSGGGGSGGGGSQIDLNITCRFAGVFHVEKNGRYSISRTEAADLCKAFNSTLPTMAQMEKALSIGFETCRYGFIEGHVVIPRIHPNSICAANNTGVYILTSNTSQYDTYCFNASAPPEEDCTSVTDLPNAFDGPITITIVNRDGTRYVQKGEYRTNPEDIYPSNPTDDDVSSGSSSERSSTSGGYIFYTFSTVHPIPDEDSPWITDSTDRIP

SEQ ID NO: 123 - protein, 216 aa, Homo sapiens; identical to SEQ ID NO: 117
  misc_feature: Anti-41BB Antibody (Urelumab) light chain

SEQ ID NO: 124 - protein, 590 aa, Homo sapiens
  misc_feature: Anti-41BB Antibody (Urelumab) - BTLA ECD antibody-ligand trap
  misc_feature: Anti-41BB Antibody (Urelumab) heavy chain + BTLA ECD
QVQLQQWGAGLLKPSETLSLTCAVYGGSFSGYYWSWIRQSPEKGLEWIGEINHGGYVTYNPSLESRVTISVDTSKNQFSLKLSSVTAADTAVYYCARDYGPGNYDWYFDLWGRGTLVTVSSASTKGPSVFPLAPCSRSTSESTAALGCLVKDYFPEPVTVSWNSGALTSGVHTFPAVLQSSGLYSLSSVVTVPSSSLGTKTYTCNVDHKPSNTKVDKRVESKYGPPCPPCPAPEFLGGPSVFLFPPKPKDTLMISRTPEVTCVVVDVSQEDPEVQFNWYVDGVEVHNAKTKPREEQFNSTYRVVSVLTVLHQDWLNGKEYKCKVSNKGLPSSIEKTISKAKGQPREPQVYTLPPSQEEMTKNQVSLTCLVKGFYPSDIAVEWESNGQPENNYKTTPPVLDSDGSFFLYSRLTVDKSRWQEGNVFSCSVMHEALHNHYTQKSLSLSLGKGGGGSGGGGSGGGGSKESCDVQLYIKRQSEHSILAGDPFELECPVKYCANRPHVTWCKLNGTTCVKLEDRQTSWKEEKNISFFILHFEPVLPNDNGSYRCSANFQSNLIESHSTTLYVTDVKSASERPSKDEMASRPWLLYR

SEQ ID NO: 125 - protein, 216 aa, Homo sapiens; identical to SEQ ID NO: 117
  misc_feature: Anti-41BB Antibody (Urelumab) light chain

SEQ ID NO: 126 - protein, 699 aa, Homo sapiens
  misc_feature: Anti-41BB Antibody (Urelumab) - CD226 ECD antibody-ligand trap
  misc_feature: Anti-41BB Antibody (Urelumab) heavy chain + CD226 ECD
QVQLQQWGAGLLKPSETLSLTCAVYGGSFSGYYWSWIRQSPEKGLEWIGEINHGGYVTYNPSLESRVTISVDTSKNQFSLKLSSVTAADTAVYYCARDYGPGNYDWYFDLWGRGTLVTVSSASTKGPSVFPLAPCSRSTSESTAALGCLVKDYFPEPVTVSWNSGALTSGVHTFPAVLQSSGLYSLSSVVTVPSSSLGTKTYTCNVDHKPSNTKVDKRVESKYGPPCPPCPAPEFLGGPSVFLFPPKPKDTLMISRTPEVTCVVVDVSQEDPEVQFNWYVDGVEVHNAKTKPREEQFNSTYRVVSVLTVLHQDWLNGKEYKCKVSNKGLPSSIEKTISKAKGQPREPQVYTLPPSQEEMTKNQVSLTCLVKGFYPSDIAVEWESNGQPENNYKTTPPVLDSDGSFFLYSRLTVDKSRWQEGNVFSCSVMHEALHNHYTQKSLSLSLGKGGGGSGGGGSGGGGSEEVLWHTSVPFAENMSLECVYPSMGILTQVEWFKIGTQQDSIAIFSPTHGMVIRKPYAERVYFLNSTMASNNMTLFFRNASEDDVGYYSCSLYTYPQGTWQKVIQVVQSDSFEAAVPSNSHIVSEPGKNVTLTCQPQMTWPVQAVRWEKIQPRQIDLLTYCNLVHGRNFTSKFPRQIVSNCSHGRWSVIVIPDVTVSDSGLYRCYLQASAGENETFVMRLTVAEGKTDNQYTLFVA

SEQ ID NO: 127 - protein, 216 aa, Homo sapiens; identical to SEQ ID NO: 117
  misc_feature: Anti-41BB Antibody (Urelumab) light chain

SEQ ID NO: 128 - protein, 645 aa, Homo sapiens
  misc_feature: Anti-41BB Antibody (Urelumab) - LIGHT ECD antibody-ligand trap
  misc_feature: Anti-41BB Antibody (Urelumab) heavy chain + LIGHT ECD
QVQLQQWGAGLLKPSETLSLTCAVYGGSFSGYYWSWIRQSPEKGLEWIGEINHGGYVTYNPSLESRVTISVDTSKNQFSLKLSSVTAADTAVYYCARDYGPGNYDWYFDLWGRGTLVTVSSASTKGPSVFPLAPCSRSTSESTAALGCLVKDYFPEPVTVSWNSGALTSGVHTFPAVLQSSGLYSLSSVVTVPSSSLGTKTYTCNVDHKPSNTKVDKRVESKYGPPCPPCPAPEFLGGPSVFLFPPKPKDTLMISRTPEVTCVVVDVSQEDPEVQFNWYVDGVEVHNAKTKPREEQFNSTYRVVSVLTVLHQDWLNGKEYKCKVSNKGLPSSIEKTISKAKGQPREPQVYTLPPSQEEMTKNQVSLTCLVKGFYPSDIAVEWESNGQPENNYKTTPPVLDSDGSFFLYSRLTVDKSRWQEGNVFSCSVMHEALHNHYTQKSLSLSLGKGGGGSGGGGSGGGGSLQLHWRLGEMVTRLPDGPAGSWEQLIQERRSHEVNPAAHLTGANSSLTGSGGPLLWETQLGLAFLRGLSYHDGALVVTKAGYYYIYSKVQLGGVGCPLGLASTITHGLYKRTPRYPEELELLVSQQSPCGRATSSSRVWWDSSFLGGVVHLEAGEKVVVRVLDERLVRLRDGTRSYFGAFMV

SEQ ID NO: 129 - protein, 216 aa, Homo sapiens; identical to SEQ ID NO: 117
  misc_feature: Anti-41BB Antibody (Urelumab) light chain

SEQ ID NO: 130 - protein, 643 aa, Homo sapiens
  misc_feature: Anti-IL23 Antibody (Guselkumab) - TIM3 ECD antibody-ligand trap
  misc_feature: Anti-IL23 Antibody (Guselkumab) heavy chain + TIM3 ECD
EVQLVQSGAEVKKPGESLKISCKGSGYSFSNYWIGWVRQMPGKGLEWMGIIDPSNSYTRYSPSFQGQVTISADKSISTAYLQWSSLKASDTAMYYCARWYYKPFDVWGQGTLVTVSSASTKGPSVFPLAPSSKSTSGGTAALGCLVKDYFPEPVTVSWNSGALTSGVHTFPAVLQSSGLYSLSSVVTVPSSSLGTQTYICNVNHKPSNTKVDKKVEPKSCDKTHTCPPCPAPELLGGPSVFLFPPKPKDTLMISRTPEVTCVVVDVSHEDPEVKFNWYVDGVEVHNAKTKPREEQYNSTYRVVSVLTVLHQDWLNGKEYKCKVSNKALPAPIEKTISKAKGQPREPQVYTLPPSRDELTKNQVSLTCLVKGFYPSDIAVEWESNGQPENNYKTTPPVLDSDGSFFLYSKLTVDKSRWQQGNVFSCSVMHEALHNHYTQKSLSLSPGKGGGGSGGGGSGGGGSSEVEYRAEVGQNAYLPCFYTPAAPGNLVPVCWGKGACPVFECGNVVLRTDERDVNYWTSRYWLNGDFRKGDVSLTIENVTLADSGIYCCRIQIPGIMNDEKFNLKLVIKPAKVTPAPTRQRDFTAAFPRMLTTRGHGPAETQTLGSLPDINLTQISTLANELRDSRLANDLRDSGATIRIG

SEQ ID NO: 131 - protein, 217 aa, Homo sapiens
  misc_feature: Anti-IL23 Antibody (Guselkumab) light chain
QSVLTQPPSVSGAPGQRVTISCTGSSSNIGSGYDVHWYQQLPGTAPKLLIYGNSKRPSGVPDRFSGSKSGTSASLAITGLQSEDEADYYCASWTDGLSLVVFGGGTKLTVLGQPKAAPSVTLFPPSSEELQANKATLVCLISDFYPGAVTVAWKADSSPVKAGVETTTPSKQSNNKYAASSYLSLTPEQWKSHRSYSCQVTHEGSTVEKTVAPTECS

SEQ ID NO: 132 - protein, 623 aa, Homo sapiens
  misc_feature: Anti-IL23 Antibody (Guselkumab) - VISTA ECD antibody-ligand trap
  misc_feature: Anti-IL23 Antibody (Guselkumab) heavy chain + VISTA ECD
EVQLVQSGAEVKKPGESLKISCKGSGYSFSNYWIGWVRQMPGKGLEWMGIIDPSNSYTRYSPSFQGQVTISADKSISTAYLQWSSLKASDTAMYYCARWYYKPFDVWGQGTLVTVSSASTKGPSVFPLAPSSKSTSGGTAALGCLVKDYFPEPVTVSWNSGALTSGVHTFPAVLQSSGLYSLSSVVTVPSSSLGTQTYICNVNHKPSNTKVDKKVEPKSCDKTHTCPPCPAPELLGGPSVFLFPPKPKDTLMISRTPEVTCVVVDVSHEDPEVKFNWYVDGVEVHNAKTKPREEQYNSTYRVVSVLTVLHQDWLNGKEYKCKVSNKALPAPIEKTISKAKGQPREPQVYTLPPSRDELTKNQVSLTCLVKGFYPSDIAVEWESNGQPENNYKTTPPVLDSDGSFFLYSKLTVDKSRWQQGNVFSCSVMHEALHNHYTQKSLSLSPGKGGGGSGGGGSGGGGSFKVATPYSLYVCPEGQNVTLTCRLLGPVDKGHDVTFYKTWYRSSRGEVQTCSERRPIRNLTFQDLHLHHGGHQAANTSHDLAQRHGLESASDHHGNFSITMRNLTLLDSGLYCCLVVEIRHHHSEHRVHGAMELQVQTGKDAPSNCVVYPSSSQESENITA

SEQ ID NO: 133 - protein, 217 aa, Homo sapiens; identical to SEQ ID NO: 131
  misc_feature: Anti-IL23 Antibody (Guselkumab) light chain

SEQ ID NO: 134 - protein, 662 aa, Homo sapiens
  misc_feature: Anti-IL23 Antibody (Guselkumab) - VSIG8 ECD antibody-ligand trap
  misc_feature: Anti-IL23 Antibody (Guselkumab) heavy chain + VSIG8 ECD
EVQLVQSGAEVKKPGESLKISCKGSGYSFSNYWIGWVRQMPGKGLEWMGIIDPSNSYTRYSPSFQGQVTISADKSISTAYLQWSSLKASDTAMYYCARWYYKPFDVWGQGTLVTVSSASTKGPSVFPLAPSSKSTSGGTAALGCLVKDYFPEPVTVSWNSGALTSGVHTFPAVLQSSGLYSLSSVVTVPSSSLGTQTYICNVNHKPSNTKVDKKVEPKSCDKTHTCPPCPAPELLGGPSVFLFPPKPKDTLMISRTPEVTCVVVDVSHEDPEVKFNWYVDGVEVHNAKTKPREEQYNSTYRVVSVLTVLHQDWLNGKEYKCKVSNKALPAPIEKTISKAKGQPREPQVYTLPPSRDELTKNQVSLTCLVKGFYPSDIAVEWESNGQPENNYKTTPPVLDSDGSFFLYSKLTVDKSRWQQGNVFSCSVMHEALHNHYTQKSLSLSPGKGGGGSGGGGSGGGGSVRINGDGQEVMYLAEGDNVRLGCPYLLDPEDLGTNSLDIEWMQVNSEPSHRENVFLTYQDKRIGHGNLPHLQQRVRFAASDPSQYDASINLMNLQVSDTATYECRVKKTTMATRKVIVTVQARPAVPMCWTEGHMSKGNDVVLKCFANGGSQPLSYKWAKISGHSHPYRAGAYHSQHSFHSELSYQESFHSTINQGLGNG

SEQ ID NO: 135 - protein, 217 aa, Homo sapiens; identical to SEQ ID NO: 131
  misc_feature: Anti-IL23 Antibody (Guselkumab) light chain

SEQ ID NO: 136 - protein, 662 aa, Homo sapiens
  misc_feature: Anti-IL23 Antibody (Guselkumab) - CD44 ECD antibody-ligand trap
  misc_feature: Anti-IL23 Antibody (Guselkumab) heavy chain + CD44 ECD
EVQLVQSGAEVKKPGESLKISCKGSGYSFSNYWIGWVRQMPGKGLEWMGIIDPSNSYTRYSPSFQGQVTISADKSISTAYLQWSSLKASDTAMYYCARWYYKPFDVWGQGTLVTVSSASTKGPSVFPLAPSSKSTSGGTAALGCLVKDYFPEPVTVSWNSGALTSGVHTFPAVLQSSGLYSLSSVVTVPSSSLGTQTYICNVNHKPSNTKVDKKVEPKSCDKTHTCPPCPAPELLGGPSVFLFPPKPKDTLMISRTPEVTCVVVDVSHEDPEVKFNWYVDGVEVHNAKTKPREEQYNSTYRVVSVLTVLHQDWLNGKEYKCKVSNKALPAPIEKTISKAKGQPREPQVYTLPPSRDELTKNQVSLTCLVKGFYPSDIAVEWESNGQPENNYKTTPPVLDSDGSFFLYSKLTVDKSRWQQGNVFSCSVMHEALHNHYTQKSLSLSPGKGGGGSGGGGSGGGGSQIDLNITCRFAGVFHVEKNGRYSISRTEAADLCKAFNSTLPTMAQMEKALSIGFETCRYGFIEGHVVIPRIHPNSICAANNTGVYILTSNTSQYDTYCFNASAPPEEDCTSVTDLPNAFDGPITITIVNRDGTRYVQKGEYRTNPEDIYPSNPTDDDVSSGSSSERSSTSGGYIFYTFSTVHPIPDEDSPWITDSTDRIP

SEQ ID NO: 137 - protein, 217 aa, Homo sapiens; identical to SEQ ID NO: 131
  misc_feature: Anti-IL23 Antibody (Guselkumab) light chain

SEQ ID NO: 138 - protein, 589 aa, Homo sapiens
  misc_feature: Anti-IL23 Antibody (Guselkumab) - BTLA ECD antibody-ligand trap
  misc_feature: Anti-IL23 Antibody (Guselkumab) heavy chain + BTLA ECD
EVQLVQSGAEVKKPGESLKISCKGSGYSFSNYWIGWVRQMPGKGLEWMGIIDPSNSYTRYSPSFQGQVTISADKSISTAYLQWSSLKASDTAMYYCARWYYKPFDVWGQGTLVTVSSASTKGPSVFPLAPSSKSTSGGTAALGCLVKDYFPEPVTVSWNSGALTSGVHTFPAVLQSSGLYSLSSVVTVPSSSLGTQTYICNVNHKPSNTKVDKKVEPKSCDKTHTCPPCPAPELLGGPSVFLFPPKPKDTLMISRTPEVTCVVVDVSHEDPEVKFNWYVDGVEVHNAKTKPREEQYNSTYRVVSVLTVLHQDWLNGKEYKCKVSNKALPAPIEKTISKAKGQPREPQVYTLPPSRDELTKNQVSLTCLVKGFYPSDIAVEWESNGQPENNYKTTPPVLDSDGSFFLYSKLTVDKSRWQQGNVFSCSVMHEALHNHYTQKSLSLSPGKGGGGSGGGGSGGGGSKESCDVQLYIKRQSEHSILAGDPFELECPVKYCANRPHVTWCKLNGTTCVKLEDRQTSWKEEKNISFFILHFEPVLPNDNGSYRCSANFQSNLIESHSTTLYVTDVKSASERPSKDEMASRPWLLYR

SEQ ID NO: 139 - protein, 217 aa, Homo sapiens; identical to SEQ ID NO: 131
  misc_feature: Anti-IL23 Antibody (Guselkumab) light chain

SEQ ID NO: 140 - protein, 698 aa, Homo sapiens
  misc_feature: Anti-IL23 Antibody (Guselkumab) - CD226 ECD antibody-ligand trap
  misc_feature: Anti-IL23 Antibody (Guselkumab) heavy chain + CD226 ECD
EVQLVQSGAEVKKPGESLKISCKGSGYSFSNYWIGWVRQMPGKGLEWMGIIDPSNSYTRYSPSFQGQVTISADKSISTAYLQWSSLKASDTAMYYCARWYYKPFDVWGQGTLVTVSSASTKGPSVFPLAPSSKSTSGGTAALGCLVKDYFPEPVTVSWNSGALTSGVHTFPAVLQSSGLYSLSSVVTVPSSSLGTQTYICNVNHKPSNTKVDKKVEPKSCDKTHTCPPCPAPELLGGPSVFLFPPKPKDTLMISRTPEVTCVVVDVSHEDPEVKFNWYVDGVEVHNAKTKPREEQYNSTYRVVSVLTVLHQDWLNGKEYKCKVSNKALPAPIEKTISKAKGQPREPQVYTLPPSRDELTKNQVSLTCLVKGFYPSDIAVEWESNGQPENNYKTTPPVLDSDGSFFLYSKLTVDKSRWQQGNVFSCSVMHEALHNHYTQKSLSLSPGKGGGGSGGGGSGGGGSEEVLWHTSVPFAENMSLECVYPSMGILTQVEWFKIGTQQDSIAIFSPTHGMVIRKPYAERVYFLNSTMASNNMTLFFRNASEDDVGYYSCSLYTYPQGTWQKVIQVVQSDSFEAAVPSNSHIVSEPGKNVTLTCQPQMTWPVQAVRWEKIQPRQIDLLTYCNLVHGRNFTSKFPRQIVSNCSHGRWSVIVIPDVTVSDSGLYRCYLQASAGENETFVMRLTVAEGKTDNQYTLFVA

SEQ ID NO: 141 - protein, 217 aa, Homo sapiens; identical to SEQ ID NO: 131
  misc_feature: Anti-IL23 Antibody (Guselkumab) light chain

SEQ ID NO: 142 - protein, 644 aa, Homo sapiens
  misc_feature: Anti-IL23 Antibody (Guselkumab) - LIGHT ECD antibody-ligand trap
  misc_feature: Anti-IL23 Antibody (Guselkumab) heavy chain + LIGHT ECD
EVQLVQSGAEVKKPGESLKISCKGSGYSFSNYWIGWVRQMPGKGLEWMGIIDPSNSYTRYSPSFQGQVTISADKSISTAYLQWSSLKASDTAMYYCARWYYKPFDVWGQGTLVTVSSASTKGPSVFPLAPSSKSTSGGTAALGCLVKDYFPEPVTVSWNSGALTSGVHTFPAVLQSSGLYSLSSVVTVPSSSLGTQTYICNVNHKPSNTKVDKKVEPKSCDKTHTCPPCPAPELLGGPSVFLFPPKPKDTLMISRTPEVTCVVVDVSHEDPEVKFNWYVDGVEVHNAKTKPREEQYNSTYRVVSVLTVLHQDWLNGKEYKCKVSNKALPAPIEKTISKAKGQPREPQVYTLPPSRDELTKNQVSLTCLVKGFYPSDIAVEWESNGQPENNYKTTPPVLDSDGSFFLYSKLTVDKSRWQQGNVFSCSVMHEALHNHYTQKSLSLSPGKGGGGSGGGGSGGGGSLQLHWRLGEMVTRLPDGPAGSWEQLIQERRSHEVNPAAHLTGANSSLTGSGGPLLWETQLGLAFLRGLSYHDGALVVTKAGYYYIYSKVQLGGVGCPLGLASTITHGLYKRTPRYPEELELLVSQQSPCGRATSSSRVWWDSSFLGGVVHLEAGEKVVVRVLDERLVRLRDGTRSYFGAFMV

SEQ ID NO: 143 - protein, 217 aa, Homo sapiens; identical to SEQ ID NO: 131
  misc_feature: Anti-IL23 Antibody (Guselkumab) light chain

SEQ ID NO: 144 - protein, 15 aa, Homo sapiens
  misc_feature: Primer
GGGGSGGGGSGGGGS

SEQ ID NO: 145 - protein, 218 aa, Homo sapiens
  misc_feature: Light chain: Anti-VISTA light chain
DIVMTQTPLSLSVTPGQPASISCRASESVDTYANSLMHWYLQKPGQPPQLLIYRASNLESGVPDRFSGSGSGTDFTLYISRVEAEDVGVYYCQQTNEDPRTFGQGTKLEIKRTVAAPSVFIFPPSDEQLKSGTASVVCLLNNFYPREAKVQWKVDNALQSGNSQESVTEQDSKDSTYSLSSTLTLSKADYEKHKVYACEVTHQGLSSPVTKSFNRGEC

SEQ ID NO: 146 - protein, 218 aa, Homo sapiens; identical to SEQ ID NO: 145

SEQ ID NO: 147 - protein, 218 aa, Homo sapiens; identical to SEQ ID NO: 145
  misc_feature: Light chain: Anti-VISTA light chain

SEQ ID NO: 148 - protein, 218 aa, Homo sapiens; identical to SEQ ID NO: 145
  misc_feature: Light chain: Anti-VISTA light chain

SEQ ID NO: 149 - protein, 218 aa, Homo sapiens; identical to SEQ ID NO: 145
  misc_feature: Light chain: Anti-VISTA light chain

SEQ ID NO: 150 - protein, 213 aa, Homo sapiens
  misc_feature: Light chain: Anti-TIGIT light chain
DIQMTQSPSLLSASVGDRVTLNCKASQSIHKNLAWYQQKLGEAPKFLIYYANSLQTGIPSRFSGSGSGTDFTLTISGLQPEDVATYFCQQYYSGWTFGGGTKVELKRTVAAPSVFIFPPSDEQLKSGTASVVCLLNNFYPREAKVQWKVDNALQSGNSQESVTEQDSKDSTYSLSSTLTLSKADYEKHKVYACEVTHQGLSSPVTKSFNRGEC

SEQ ID NO: 151 - protein, 213 aa, Homo sapiens; identical to SEQ ID NO: 150
  misc_feature: Light chain: Anti-TIGIT light chain

SEQ ID NO: 152 - protein, 213 aa, Homo sapiens; identical to SEQ ID NO: 150
  misc_feature: Light chain: Anti-TIGIT light chain

SEQ ID NO: 153 - protein, 213 aa, Homo sapiens; identical to SEQ ID NO: 150
  misc_feature: Light chain: Anti-TIGIT light chain

SEQ ID NO: 154 - protein, 213 aa, Homo sapiens; identical to SEQ ID NO: 150
  misc_feature: Light chain: Anti-TIGIT light chain

SEQ ID NO: 155 - protein, 215 aa, Homo sapiens
  misc_feature: Light chain: Anti-BTLA light chain
EIVLTQSPATLSLSPGERATLSCRASQSVSSYLAWYQQKPGQAPRLLIYDASNRATGIPARFSGSGSGTDFTLTISSLEPEDFAVYYCQQRSNWPPITFGQGTRLEIKRTVAAPSVFIFPPSDEQLKSGTASVVCLLNNFYPREAKVQWKVDNALQSGNSQESVTEQDSKDSTYSLSSTLTLSKADYEKHKVYACEVTHQGLSSPVTKSFNRGEC

SEQ ID NO: 156 - protein, 215 aa, Homo sapiens; identical to SEQ ID NO: 155
  misc_feature: Light chain: Anti-BTLA light chain

SEQ ID NO: 157 - protein, 215 aa, Homo sapiens; identical to SEQ ID NO: 155
  misc_feature: Light chain: Anti-BTLA light chain

SEQ ID NO: 158 - protein, 215 aa, Homo sapiens; identical to SEQ ID NO: 155
  misc_feature: Light chain: Anti-BTLA light chain

SEQ ID NO: 159 - protein, 218 aa, Homo sapiens
  misc_feature: Light chain: Anti-LAG-3 light chain
DIVMTQTPLSLSVTPGQPASISCKASQSLDYEGDSDMNWYLQKPGQPPQLLIYGASNLESGVPDRFSGSGSGTDFTLKISRVEAEDVGVYYCQQSTEDPRTFGGGTKVEIKRTVAAPSVFIFPPSDEQLKSGTASVVCLLNNFYPREAKVQWKVDNALQSGNSQESVTEQDSKDSTYSLSSTLTLSKADYEKHKVYACEVTHQGLSSPVTKSFNRGEC

SEQ ID NO: 160 - protein, 218 aa, Homo sapiens; identical to SEQ ID NO: 159
  misc_feature: Light chain: Anti-LAG-3 light chain

SEQ ID NO: 161 - protein, 218 aa, Homo sapiens; identical to SEQ ID NO: 159
  misc_feature: Light chain: Anti-LAG-3 light chain

SEQ ID NO: 162 - protein, 218 aa, Homo sapiens; identical to SEQ ID NO: 159
  misc_feature: Light chain: Anti-LAG-3 light chain

SEQ ID NO: 163 - protein, 218 aa, Homo sapiens; identical to SEQ ID NO: 159
  misc_feature: Light chain: Anti-LAG-3 light chain

SEQ ID NO: 164 - protein, 219 aa, Homo sapiens
  misc_feature: Light chain: Anti-CCR4 light chain
DVLMTQSPLSLPVTPGEPASISCRSSRNIVHINGDTYLEWYLQKPGQSPQLLIYKVSNRFSGVPDRFSGSGSGTDFTLKISRVEAEDVGVYYCFQGSLLPWTFGQGTKVEIKRTVAAPSVFIFPPSDEQLKSGTASVVCLLNNFYPREAKVQWKVDNALQSGNSQESVTEQDSKDSTYSLSSTLTLSKADYEKHKVYACEVTHQGLSSPVTKSFNRGEC

SEQ ID NO: 165 - protein, 219 aa, Homo sapiens; identical to SEQ ID NO: 164
  misc_feature: Light chain: Anti-CCR4 light chain

SEQ ID NO: 166 - protein, 219 aa, Homo sapiens; identical to SEQ ID NO: 164
  misc_feature: Light chain: Anti-CCR4 light chain

SEQ ID NO: 167 - protein, 219 aa, Homo sapiens; identical to SEQ ID NO: 164
  misc_feature: Light chain: Anti-CCR4 light chain

SEQ ID NO: 168 - protein, 219 aa, Homo sapiens; identical to SEQ ID NO: 164
  misc_feature: Light chain: Anti-CCR4 light chain

SEQ ID NO: 169 - protein, 214 aa, Homo sapiens
  misc_feature: Light chain = Anti-PD-1 Light chain
EIVLTQSPATLSLSPGERATLSCRASQSVSSYLAWYQQKPGQAPRLLIYDASNRATGIPARFSGSGSGTDFTLTISSLEPEDFAVYYCQQSSNWPRTFGQGTKVEIKRTVAAPSVFIFPPSDEQLKSGTASVVCLLNNFYPREAKVQWKVDNALQSGNSQESVTEQDSKDSTYSLSSTLTLSKADYEKHKVYACEVTHQGLSSPVTKSFNRGEC

SEQ ID NO: 170 - protein, 214 aa, Homo sapiens; identical to SEQ ID NO: 169
  misc_feature: Light chain = Anti-PD-1 Light chain

SEQ ID NO: 171 - protein, 214 aa, Homo sapiens; identical to SEQ ID NO: 169
  misc_feature: Light chain = Anti-PD-1 Light chain

SEQ ID NO: 172 - protein, 215 aa, Homo sapiens
  misc_feature: Light chain = Anti-CTLA-4 Light chain
EIVLTQSPGTLSLSPGERATLSCRASQSVGSSYLAWYQQKPGQAPRLLIYGAFSRATGIPDRFSGSGSGTDFTLTISRLEPEDFAVYYCQQYGSSPWTFGQGTKVEIKRTVAAPSVFIFPPSDEQLKSGTASVVCLLNNFYPREAKVQWKVDNALQSGNSQESVTEQDSKDSTYSLSSTLTLSKADYEKHKVYACEVTHQGLSSPVTKSFNRGEC

SEQ ID NO: 173 - protein, 218 aa, Homo sapiens; identical to SEQ ID NO: 159
  misc_feature: Light chain: Anti-LAG-3 light chain

SEQ ID NO: 174 - protein, 213 aa, Homo sapiens; identical to SEQ ID NO: 150
  misc_feature: Light chain: Anti-TIGIT light chain

SEQ ID NO: 175 - protein, 215 aa, Homo sapiens; identical to SEQ ID NO: 155
  misc_feature: Light chain: Anti-BTLA light chain

SEQ ID NO: 176 - protein, 218 aa, Homo sapiens; identical to SEQ ID NO: 145
  misc_feature: Light chain: Anti-VISTA light chain

SEQ ID NO: 177 - protein, 219 aa, Homo sapiens; identical to SEQ ID NO: 164
  misc_feature: Light chain: Anti-CCR4 light chain

SEQ ID NO: 178 - protein, 215 aa, Homo sapiens; identical to SEQ ID NO: 172
  misc_feature: Light chain = Anti-CTLA-4 Light chain

SEQ ID NO: 179 - protein, 218 aa, Homo sapiens
  misc_feature: Light chain = Anti-PD-1 Light chain
EIVLTQSPATLSLSPGERATLSCRASKGVSTSGYSYLHWYQQKPGQAPRLLIYLASYLESGVPARFSGSGSGTDFTLTISSLEPEDFAVYYCQHSRDLPLTFGGGTKVEIKRTVAAPSVFIFPPSDEQLKSGTASVVCLLNNFYPREAKVQWKVDNALQSGNSQESVTEQDSKDSTYSLSSTLTLSKADYEKHKVYACEVTHQGLSSPVTKSFNRGEC

SEQ ID NO: 180 - protein, 214 aa, Homo sapiens
  misc_feature: Light chain = Anti-PD-L1 Light chain
DIQMTQSPSSLSASVGDRVTITCRASQDVSTAVAWYQQKPGKAPKLLIYSASFLYSGVPSRFSGSGSGTDFTLTISSLQPEDFATYYCQQYLYHPATFGQGTKVEIKRTVAAPSVFIFPPSDEQLKSGTASVVCLLNNFYPREAKVQWKVDNALQSGNSQESVTEQDSKDSTYSLSSTLTLSKADYEKHKVYACEVTHQGLSSPVTKSFNRGEC

SEQ ID NO: 181 - protein, 215 aa, Homo sapiens; identical to SEQ ID NO: 172
  misc_feature: Light chain = Anti-CTLA-4 Light chain

SEQ ID NO: 182 - protein, 218 aa, Homo sapiens; identical to SEQ ID NO: 179
  misc_feature: Light chain = Anti-PD-1 Light chain

SEQ ID NO: 183 - protein, 214 aa, Homo sapiens; identical to SEQ ID NO: 180
  misc_feature: Light chain = Anti-PD-L1 Light chain

SEQ ID NO: 184 - protein, 215 aa, Homo sapiens; identical to SEQ ID NO: 172
  misc_feature: Light chain = Anti-CTLA-4 Light chain

SEQ ID NO: 185 - protein, 214 aa, Homo sapiens; identical to SEQ ID NO: 180
  misc_feature: Light chain = Anti-PD-L1 Light chain

SEQ ID NO: 186 - protein, 218 aa, Homo sapiens; identical to SEQ ID NO: 179
  misc_feature: Light chain = Anti-PD-1 Light chain

SEQ ID NO: 187 - protein, 214 aa, Homo sapiens; identical to SEQ ID NO: 169
  misc_feature: Light chain = Anti-PD-1 Light chain

SEQ ID NO: 188 - protein, 215 aa, Homo sapiens; identical to SEQ ID NO: 172
  misc_feature: Light chain = Anti-CTLA-4 Light chain

SEQ ID NO: 189 - protein, 214 aa, Homo sapiens; identical to SEQ ID NO: 169
  misc_feature: Light chain = Anti-PD-1 Light chain

SEQ ID NO: 190 - protein, 568 aa, Homo sapiens
  misc_feature: TIM3 ecd - Fc - TGF Beta RII ecd fusion protein
SEVEYRAEVGQNAYLPCFYTPAAPGNLVPVCWGKGACPVFECGNVVLRTDERDVNYWTSRYWLNGDFRKGDVSLTIENVTLADSGIYCCRIQIPGIMNDEKFNLKLVIKPAKVTPAPTRQRDFTAAFPRMLTTRGHGPAETQTLGSLPDINLTQISTLANELRDSRLANDLRDSGATIRIEGRMDPKSCDKTHTCPPCPAPELLGGPSVFLFPPKPKDTLMISRTPEVTCVVVDVSHEDPEVKFNWYVDGVEVHNAKTKPREEQYNSTYRVVSVLTVLHQDWLNGKEYKCKVSNKALPAPIEKTISKAKGQPREPQVYTLPPSREEMTKNQVSLTCLVKGFYPSDIAVEWESNGQPENNYKTTPPVLDSDGSFFLYSKLTVDKSRWQQGNVFSCSVMHEALHNHYTQKSLSLSPGKGGGGSGGGGSGGGGSTIPPHVQKSVNNDMIVTDNNGAVKFPQLCKFCDVRFSTCDNQKSCMSNCSITSICEKPQEVCVAVWRKNDENITLETVCHDPKLPYHDFILEDAASPKCIMKEKKKPGETFFMCSCSSDECNDNIIFSEEYNTSNPD

SEQ ID NO: 191 - protein, 561 aa, Homo sapiens
  misc_feature: TIM3 ecd - Fc - TGF Beta RII ecd fusion protein
SEVEYRAEVGQNAYLPCFYTPAAPGNLVPVCWGKGACPVFECGNVVLRTDERDVNYWTSRYWLNGDFRKGDVSLTIENVTLADSGIYCCRIQIPGIMNDEKFNLKLVIKPAKVTPAPTRQRDFTAAFPRMLTTRGHGPAETQTLGSLPDINLTQISTLANELRDSRLANDLRDSGATIRIGSTGTHTCPPCPAPELLGGPSVFLFPPKPKDTLMISRTPEVTCVVVDVSHEDPEVKFNWYVDGVEVHNAKTKPREEQYNSTYRVVSVLTVLHQDWLNGKEYKCKVSNKALPAPIEKTISKAKGQPREPQVYTLPPSREEMTKNQVSLTCLVKGFYPSDIAVEWESNGQPENNYKTTPPVLDSDGSFFLYSKLTVDKSRWQQGNVFSCSVMHEALHNHYTQKSLSLSPGKGGGGSGGGGSGGGGSTIPPHVQKSVNNDMIVTDNNGAVKFPQLCKFCDVRFSTCDNQKSCMSNCSITSICEKPQEVCVAVWRKNDENITLETVCHDPKLPYHDFILEDAASPKCIMKEKKKPGETFFMCSCSSDECNDNIIFSEEYNTSNPD

SEQ ID NO: 192 - protein, 646 aa, Homo sapiens
  misc_feature: Heavy chain = Anti-PD-L1 heavy chain + TIM3 ECD fusion sequence
EVQLLESGGGLVQPGGSLRLSCAASGFTFSSYIMMWVRQAPGKGLEWVSSIYPSGGITFYADTVKGRFTISRDNSKNTLYLQMNSLRAEDTAVYYCARIKLGTVTTVDYWGQGTLVTVSSASTKGPSVFPLAPSSKSTSGGTAALGCLVKDYFPEPVTVSWNSGALTSGVHTFPAVLQSSGLYSLSSVVTVPSSSLGTQTYICNVNHKPSNTKVDKRVEPKSCDKTHTCPPCPAPELLGGPSVFLFPPKPKDTLMISRTPEVTCVVVDVSHEDPEVKFNWYVDGVEVHNAKTKPREEQYNSTYRVVSVLTVLHQDWLNGKEYKCKVSNKALPAPIEKTISKAKGQPREPQVYTLPPSREEMTKNQVSLTCLVKGFYPSDIAVEWESNGQPENNYKTTPPVLDSDGSFFLYSKLTVDKSRWQQGNVFSCSVMHEALHNHYTQKSLSLSPGKGGGGSGGGGSGGGGSSEVEYRAEVGQNAYLPCFYTPAAPGNLVPVCWGKGACPVFECGNVVLRTDERDVNYWTSRYWLNGDFRKGDVSLTIENVTLADSGIYCCRIQIPGIMNDEKFNLKLVIKPAKVTPAPTRQRDFTAAFPRMLTTRGHGPAETQTLGSLPDINLTQISTLANELRDSRLANDLRDSGATIRIG

SEQ ID NO: 193 - protein, 216 aa, Homo sapiens
  misc_feature: Light chain = Anti-PD-L1 Light chain
QSALTQPASVSGSPGQSITISCTGTSSDVGGYNYVSWYQQHPGKAPKLMIYDVSNRPSGVSNRFSGSKSGNTASLTISGLQAEDEADYYCSSYTSSSTRVFGTGTKVTVLGQPKANPTVTLFPPSSEELQANKATLVCLISDFYPGAVTVAWKADGSPVKAGVETTKPSKQSNNKYAASSYLSLTPEQWKSHRSYSCQVTHEGSTVEKTVAPTECS

SEQ ID NO: 194 - protein, 150 aa, Homo sapiens [sequence omitted]

SEQ ID NO: 195 - protein, 592 aa, Homo sapiens
  misc_feature: Fusion protein comprising a ligand-binding sequence of Programmed Death-1 extracellular domain (PD-1 ecd) and ligand-binding sequence of TIM-3
  misc_feature: extracellular domain (TIM3 ecd): TIM3 ecd + PD-1 ecd fusion protein
SEVEYRAEVGQNAYLPCFYTPAAPGNLVPVCWGKGACPVFECGNVVLRTDERDVNYWTSRYWLNGDFRKGDVSLTIENVTLADSGIYCCRIQIPGIMNDEKFNLKLVIKPAKVTPAPTRQRDFTAAFPRMLTTRGHGPAETQTLGSLPDINLTQISTLANELRDSRLANDLRDSGATIRIGGGGGSGGGGSGGGGSPKSCDKTHTCPPCPAPELLGGPSVFLFPPKPKDTLMISRTPEVTCVVVDVSHEDPEVKFNWYVDGVEVHNAKTKPREEQYNSTYRVVSVLTVLHQDWLNGKEYKCKVSNKALPAPIEKTISKAKGQPREPQVYTLPPSREEMTKNQVSLTCLVKGFYPSDIAVEWESNGQPENNYKTTPPVLDSDGSFFLYSKLTVDKSRWQQGNVFSCSVMHEALHNHYTQKSLSLSPGKGGGGSGGGGSGGGGSPGWFLDSPDRPWNPPTFSPALLVVTEGDNATFTCSFSNTSESFVLNWYRMSPSNQTDKLAAFPEDRSQPGQDCRFRVTQLPNGRDFHMSVVRARRNDSGTYLCGAISLAPKAQIKESLRAELRVTERRAEVPTAHPSPSPRPAGQFQTLV

SEQ ID NO: 196 - protein, 581 aa, Homo sapiens
  misc_feature: Fusion protein comprising a ligand-binding sequence of Programmed Death-1 extracellular domain (PD-1 ecd) and ligand-binding sequence of TIM-3
  misc_feature: extracellular domain (TIM3 ecd): TIM3 ecd + PD-1 ecd fusion protein
SEVEYRAEVGQNAYLPCFYTPAAPGNLVPVCWGKGACPVFECGNVVLRTDERDVNYWTSRYWLNGDFRKGDVSLTIENVTLADSGIYCCRIQIPGIMNDEKFNLKLVIKPAKVTPAPTRQRDFTAAFPRMLTTRGHGPAETQTLGSLPDINLTQISTLANELRDSRLANDLRDSGATIRIEGRMDPKSCDKTHTCPPCPAPELLGGPSVFLFPPKPKDTLMISRTPEVTCVVVDVSHEDPEVKFNWYVDGVEVHNAKTKPREEQYNSTYRVVSVLTVLHQDWLNGKEYKCKVSNKALPAPIEKTISKAKGQPREPQVYTLPPSREEMTKNQVSLTCLVKGFYPSDIAVEWESNGQPENNYKTTPPVLDSDGSFFLYSKLTVDKSRWQQGNVFSCSVMHEALHNHYTQKSLSLSPGKGGGGSGGGGSGGGGSPGWFLDSPDRPWNPPTFSPALLVVTEGDNATFTCSFSNTSESFVLNWYRMSPSNQTDKLAAFPEDRSQPGQDCRFRVTQLPNGRDFHMSVVRARRNDSGTYLCGAISLAPKAQIKESLRAELRVTERRAEVPTAHPSPSPRPAGQFQTLV

SEQ ID NO: 197 - protein, 574 aa, Homo sapiens
  misc_feature: Fusion protein comprising a ligand-binding sequence of Programmed Death-1 extracellular domain (PD-1 ecd) and ligand-binding sequence of TIM-3
  misc_feature: extracellular domain (TIM3 ecd): TIM3 ecd + PD-1 ecd fusion protein
SEVEYRAEVGQNAYLPCFYTPAAPGNLVPVCWGKGACPVFECGNVVLRTDERDVNYWTSRYWLNGDFRKGDVSLTIENVTLADSGIYCCRIQIPGIMNDEKFNLKLVIKPAKVTPAPTRQRDFTAAFPRMLTTRGHGPAETQTLGSLPDINLTQISTLANELRDSRLANDLRDSGATIRIGSTGTHTCPPCPAPELLGGPSVFLFPPKPKDTLMISRTPEVTCVVVDVSHEDPEVKFNWYVDGVEVHNAKTKPREEQYNSTYRVVSVLTVLHQDWLNGKEYKCKVSNKALPAPIEKTISKAKGQPREPQVYTLPPSREEMTKNQVSLTCLVKGFYPSDIAVEWESNGQPENNYKTTPPVLDSDGSFFLYSKLTVDKSRWQQGNVFSCSVMHEALHNHYTQKSLSLSPGKGGGGSGGGGSGGGGSPGWFLDSPDRPWNPPTFSPALLVVTEGDNATFTCSFSNTSESFVLNWYRMSPSNQTDKLAAFPEDRSQPGQDCRFRVTQLPNGRDFHMSVVRARRNDSGTYLCGAISLAPKAQIKESLRAELRVTERRAEVPTAHPSPSPRPAGQFQTLV

SEQ ID NO: 198 - protein, 150 aa, Homo sapiens [sequence omitted]

SEQ ID NO: 199 - protein, 231 aa, Homo sapiens
  misc_feature: IgG Fc sequence or fragment thereof
PKSCDKTHTCPPCPAPELLGGPSVFLFPPKPKDTLMISRTPEVTCVVVDVSHEDPEVKFNWYVDGVEVHNAKTKPREEQYNSTYRVVSVLTVLHQDWLNGKEYKCKVSNKALPAPIEKTISKAKGQPREPQVYTLPPSREEMTKNQVSLTCLVKGFYPSDIAVEWESNGQPENNYKTTPPVLDSDGSFFLYSKLTVDKSRWQQGNVFSCSVMHEALHNHYTQKSLSLSPGK

SEQ ID NO: 200 - protein, 181 aa, Homo sapiens; identical to SEQ ID NO: 2
  misc_feature: TIM-3 Extracellular domain sequence

SEQ ID NO: 201 - protein, 600 aa, Homo sapiens
  misc_feature: Anti-CTLA4 Antibody (Ipilimumab)
  misc_feature: TGF beta RII ECD + PD-1 ECD antibody-ligand trap
QVQLVESGGGVVQPGRSLRLSCAASGFTFSSYTMHWVRQAPGKGLEWVTFISYDGNNKYYADSVKGRFTISRDNSKNTLYLQMNSLRAEDTAIYYCARTGWLGPFDYWGQGTLVTVSSASTKGPSVFPLAPSSKSTSGGTAALGCLVKDYFPEPVTVSWNSGALTSGVHTFPAVLQSSGLYSLSSVVTVPSSSLGTQTYICNVNHKPSNTKVDKRVEPKSCDKTHTCPPCPAPELLGGPSVFLFPPKPKDTLMISRTPEVTCVVVDVSHEDPEVKFNWYVDGVEVHNAKTKPREEQYNSTYRVVSVLTVLHQDWLNGKEYKCKVSNKALPAPIEKTISKAKGQPREPQVYTLPPSRDELTKNQVSLTCLVKGFYPSDIAVEWESNGQPENNYKTTPPVLDSDGSFFLYSKLTVDKSRWQQGNVFSCSVMHEALHNHYTQKSLSLSPGKGGGGSGGGGSGGGGSTIPPHVQKSVNNDMIVTDNNGAVKFPQLCKFCDVRFSTCDNQKSCMSNCSITSICEKPQEVCVAVWRKNDENITLETVCHDPKLPYHDFILEDAASPKCIMKEKKKPGETFFMCSCSSDECNDNIIFSEEYNTSNPD

SEQ ID NO: 202 - skipped

SEQ ID NO: 203 - protein, 600 aa, Homo sapiens; identical to SEQ ID NO: 201
  misc_feature: Anti-CTLA4 Antibody (Ipilimumab)
  misc_feature: Anti-CTLA4 Antibody (Ipilimumab) - TGF beta RII

SEQ ID NO: 204 - protein, 411 aa, Homo sapiens
  misc_feature: Anti-CTLA4 Antibody (Ipilimumab)
  misc_feature: light chain + TIM3 ECD
EIVLTQSPGTLSLSPGERATLSCRASQSVGSSYLAWYQQKPGQAPRLLIYGAFSRATGIPDRFSGSGSGTDFTLTISRLEPEDFAVYYCQQYGSSPWTFGQGTKVEIKRTVAAPSVFIFPPSDEQLKSGTASVVCLLNNFYPREAKVQWKVDNALQSGNSQESVTEQDSKDSTYSLSSTLTLSKADYEKHKVYACEVTHQGLSSPVTKSFNRGECGGGGSGGGGSGGGGSSEVEYRAEVGQNAYLPCFYTPAAPGNLVPVCWGKGACPVFECGNVVLRTDERDVNYWTSRYWLNGDFRKGDVSLTIENVTLADSGIYCCRIQIPGIMNDEKFNLKLVIKPAKVTPAPTRQRDFTAAFPRMLTTRGHGPAETQTLGSLPDINLTQISTLANELRDSRLANDLRDSGATIRIG

SEQ ID NO: 205 - protein, 613 aa, Homo sapiens
  misc_feature: Anti-CTLA4 Antibody (Ipilimumab)
  misc_feature: PD-1 ECD + TIM3 ECD antibody-ligand trap
QVQLVESGGGVVQPGRSLRLSCAASGFTFSSYTMHWVRQAPGKGLEWVTFISYDGNNKYYADSVKGRFTISRDNSKNTLYLQMNSLRAEDTAIYYCARTGWLGPFDYWGQGTLVTVSSASTKGPSVFPLAPSSKSTSGGTAALGCLVKDYFPEPVTVSWNSGALTSGVHTFPAVLQSSGLYSLSSVVTVPSSSLGTQTYICNVNHKPSNTKVDKRVEPKSCDKTHTCPPCPAPELLGGPSVFLFPPKPKDTLMISRTPEVTCVVVDVSHEDPEVKFNWYVDGVEVHNAKTKPREEQYNSTYRVVSVLTVLHQDWLNGKEYKCKVSNKALPAPIEKTISKAKGQPREPQVYTLPPSRDELTKNQVSLTCLVKGFYPSDIAVEWESNGQPENNYKTTPPVLDSDGSFFLYSKLTVDKSRWQQGNVFSCSVMHEALHNHYTQKSLSLSPGKGGGGSGGGGSGGGGSPGWFLDSPDRPWNPPTFSPALLVVTEGDNATFTCSFSNTSESFVLNWYRMSPSNQTDKLAAFPEDRSQPGQDCRFRVTQLPNGRDFHMSVVRARRNDSGTYLCGAISLAPKAQIKESLRAELRVTERRAEVPTAHPSPSPRPAGQFQTLV

SEQ ID NO: 206 - protein, 411 aa, Homo sapiens; identical to SEQ ID NO: 204
  misc_feature: Anti-CTLA4 Antibody (Ipilimumab)
  misc_feature: light chain + TIM3 ECD

SEQ ID NO: 207 - protein, 644 aa, Homo sapiens; identical to SEQ ID NO: 50
  misc_feature: Anti-CTLA4 Antibody (Ipilimumab)
  misc_feature: TIM3 ECD + PD-1 ECD antibody-ligand trap

SEQ ID NO: 208 - protein, 380 aa, Homo sapiens
  misc_feature: Anti-CTLA4 Antibody (Ipilimumab)
  misc_feature: light chain + PD-1 ECD
EIVLTQSPGTLSLSPGERATLSCRASQSVGSSYLAWYQQKPGQAPRLLIYGAFSRATGIPDRFSGSGSGTDFTLTISRLEPEDFAVYYCQQYGSSPWTFGQGTKVEIKRTVAAPSVFIFPPSDEQLKSGTASVVCLLNNFYPREAKVQWKVDNALQSGNSQESVTEQDSKDSTYSLSSTLTLSKADYEKHKVYACEVTHQGLSSPVTKSFNRGECGGGGSGGGGSGGGGSPGWFLDSPDRPWNPPTFSPALLVVTEGDNATFTCSFSNTSESFVLNWYRMSPSNQTDKLAAFPEDRSQPGQDCRFRVTQLPNGRDFHMSVVRARRNDSGTYLCGAISLAPKAQIKESLRAELRVTERRAEVPTAHPSPSPRPAGQFQTLV

SEQ ID NO: 209 - protein, 448 aa, Homo sapiens
  misc_feature: Anti-CTLA4 Antibody (Ipilimumab)
  misc_feature: PD-1 ECD antibody-ligand trap
QVQLVESGGGVVQPGRSLRLSCAASGFTFSSYTMHWVRQAPGKGLEWVTFISYDGNNKYYADSVKGRFTISRDNSKNTLYLQMNSLRAEDTAIYYCARTGWLGPFDYWGQGTLVTVSSASTKGPSVFPLAPSSKSTSGGTAALGCLVKDYFPEPVTVSWNSGALTSGVHTFPAVLQSSGLYSLSSVVTVPSSSLGTQTYICNVNHKPSNTKVDKRVEPKSCDKTHTCPPCPAPELLGGPSVFLFPPKPKDTLMISRTPEVTCVVVDVSHEDPEVKFNWYVDGVEVHNAKTKPREEQYNSTYRVVSVLTVLHQDWLNGKEYKCKVSNKALPAPIEKTISKAKGQPREPQVYTLPPSRDELTKNQVSLTCLVKGFYPSDIAVEWESNGQPENNYKTTPPVLDSDGSFFLYSKLTVDKSRWQQGNVFSCSVMHEALHNHYTQKSLSLSPGK

SEQ ID NO: 210 - protein, 380 aa, Homo sapiens; identical to SEQ ID NO: 208
  misc_feature: Anti-CTLA4 Antibody (Ipilimumab)
  misc_feature: light chain + PD-1 ECD

SEQ ID NO: 211 - protein, 448 aa, Homo sapiens; identical to SEQ ID NO: 209
  misc_feature: Anti-CTLA4 Antibody (Ipilimumab)
  misc_feature: TIM3 ECD antibody-ligand trap

SEQ ID NO: 212 - protein, 411 aa, Homo sapiens; identical to SEQ ID NO: 204
  misc_feature: Anti-CTLA4 Antibody (Ipilimumab)
  misc_feature: light chain + TIM3 ECD

SEQ ID NO: 213 - protein, 601 aa, Homo sapiens
  misc_feature: Anti-IL6R Antibody (Tocilizumab) - TGF beta RII ECD + PD-1 ECD antibody-ligand trap
  misc_feature: Anti-IL6R Antibody (Tocilizumab) heavy chain + TGF beta RII ECD
QVQLQESGPGLVRPSQTLSLTCTVSGYSITSDHAWSWVRQPPGRGLEWIGYISYSGITTYNPSLKSRVTMLRDTSKNQFSLRLSSVTAADTAVYYCARSLARTTAMDYWGQGSLVTVSSASTKGPSVFPLAPSSKSTSGGTAALGCLVKDYFPEPVTVSWNSGALTSGVHTFPAVLQSSGLYSLSSVVTVPSSSLGTQTYICNVNHKPSNTKVDKKVEPKSCDKTHTCPPCPAPELLGGPSVFLFPPKPKDTLMISRTPEVTCVVVDVSHEDPEVKFNWYVDGVEVHNAKTKPREEQYNSTYRVVSVLTVLHQDWLNGKEYKCKVSNKALPAPIEKTISKAKGQPREPQVYTLPPSRDELTKNQVSLTCLVKGFYPSDIAVEWESNGQPENNYKTTPPVLDSDGSFFLYSKLTVDKSRWQQGNVFSCSVMHEALHNHYTQKSLSLSPGKGGGGSGGGGSGGGGSTIPPHVQKSVNNDMIVTDNNGAVKFPQLCKFCDVRFSTCDNQKSCMSNCSITSICEKPQEVCVAVWRKNDENITLETVCHDPKLPYHDFILEDAASPKCIMKEKKKPGETFFMCSCSSDECNDNIIFSEEYNTSNPD

SEQ ID NO: 214 - protein, 379 aa, Homo sapiens
  misc_feature: Anti-IL6R Antibody (Tocilizumab) light chain + PD-1 ECD
DIQMTQSPSSLSASVGDRVTITCRASQDISSYLNWYQQKPGKAPKLLIYYTSRLHSGVPSRFSGSGSGTDFTFTISSLQPEDIATYYCQQGNTLPYTFGQGTKVEIKRTVAAPSVFIFPPSDEQLKSGTASVVCLLNNFYPREAKVQWKVDNALQSGNSQESVTEQDSKDSTYSLSSTLTLSKADYEKHKVYACEVTHQGLSSPVTKSFNRGECGGGGSGGGGSGGGGSPGWFLDSPDRPWNPPTFSPALLVVTEGDNATFTCSFSNTSESFVLNWYRMSPSNQTDKLAAFPEDRSQPGQDCRFRVTQLPNGRDFHMSVVRARRNDSGTYLCGAISLAPKAQIKESLRAELRVTERRAEVPTAHPSPSPRPAGQFQTLV

SEQ ID NO: 215 - protein, 601 aa, Homo sapiens; identical to SEQ ID NO: 213
  misc_feature: Anti-IL6R Antibody (Tocilizumab) - TGF beta RII ECD + TIM3 ECD antibody-ligand trap
  misc_feature: Anti-IL6R Antibody (Tocilizumab) heavy chain + TGF beta RII ECD

SEQ ID NO: 216 - protein, 410 aa, Homo sapiens
  misc_feature: Anti-IL6R Antibody (Tocilizumab) light chain + TIM3 ECD
DIQMTQSPSSLSASVGDRVTITCRASQDISSYLNWYQQKPGKAPKLLIYYTSRLHSGVPSRFSGSGSGTDFTFTISSLQPEDIATYYCQQGNTLPYTFGQGTKVEIKRTVAAPSVFIFPPSDEQLKSGTASVVCLLNNFYPREAKVQWKVDNALQSGNSQESVTEQDSKDSTYSLSSTLTLSKADYEKHKVYACEVTHQGLSSPVTKSFNRGECGGGGSGGGGSGGGGSSEVEYRAEVGQNAYLPCFYTPAAPGNLVPVCWGKGACPVFECGNVVLRTDERDVNYWTSRYWLNGDFRKGDVSLTIENVTLADSGIYCCRIQIPGIMNDEKFNLKLVIKPAKVTPAPTRQRDFTAAFPRMLTTRGHGPAETQTLGSLPDINLTQISTLANELRDSRLANDLRDSGATIRIG

SEQ ID NO: 217 - protein, 614 aa, Homo sapiens
  misc_feature: Anti-IL6R Antibody (Tocilizumab) - PD-1 ECD + TIM3 ECD antibody-ligand trap
  misc_feature: Anti-IL6R Antibody (Tocilizumab) heavy chain + PD-1 ECD
QVQLQESGPGLVRPSQTLSLTCTVSGYSITSDHAWSWVRQPPGRGLEWIGYISYSGITTYNPSLKSRVTMLRDTSKNQFSLRLSSVTAADTAVYYCARSLARTTAMDYWGQGSLVTVSSASTKGPSVFPLAPSSKSTSGGTAALGCLVKDYFPEPVTVSWNSGALTSGVHTFPAVLQSSGLYSLSSVVTVPSSSLGTQTYICNVNHKPSNTKVDKKVEPKSCDKTHTCPPCPAPELLGGPSVFLFPPKPKDTLMISRTPEVTCVVVDVSHEDPEVKFNWYVDGVEVHNAKTKPREEQYNSTYRVVSVLTVLHQDWLNGKEYKCKVSNKALPAPIEKTISKAKGQPREPQVYTLPPSRDELTKNQVSLTCLVKGFYPSDIAVEWESNGQPENNYKTTPPVLDSDGSFFLYSKLTVDKSRWQQGNVFSCSVMHEALHNHYTQKSLSLSPGKGGGGSGGGGSGGGGSPGWFLDSPDRPWNPPTFSPALLVVTEGDNATFTCSFSNTSESFVLNWYRMSPSNQTDKLAAFPEDRSQPGQDCRFRVTQLPNGRDFHMSVVRARRNDSGTYLCGAISLAPKAQIKESLRAELRVTERRAEVPTAHPSPSPRPAGQFQTLV

SEQ ID NO: 218 - protein, 410 aa, Homo sapiens; identical to SEQ ID NO: 216
  misc_feature: Anti-IL6R Antibody (Tocilizumab) - PD-1 ECD + TIM3 ECD antibody-ligand trap
  misc_feature: Anti-IL6R Antibody (Tocilizumab) light chain + TIM3 ECD

SEQ ID NO: 219 - protein, 645 aa, Homo sapiens; identical to SEQ ID NO: 60
  misc_feature: Anti-IL6R Antibody (Tocilizumab) - TIM3 ECD + PD-1 ECD antibody-ligand trap
  misc_feature: Anti-IL6R Antibody (Tocilizumab) heavy chain + TIM3 ECD

SEQ ID NO: 220 - protein, 379 aa, Homo sapiens; identical to SEQ ID NO: 214
  misc_feature: Anti-IL6R Antibody (Tocilizumab) - TIM3 ECD + PD-1 ECD antibody-ligand trap
  misc_feature: Anti-IL6R Antibody (Tocilizumab) light chain + PD-1 ECD

SEQ ID NO: 221 - protein, 449 aa, Homo sapiens
  misc_feature: Anti-IL6R Antibody (Tocilizumab) - PD-1 ECD antibody-ligand trap
  misc_feature: Anti-IL6R Antibody (Tocilizumab) heavy chain
QVQLQESGPGLVRPSQTLSLTCTVSGYSITSDHAWSWVRQPPGRGLEWIGYISYSGITTYNPSLKSRVTMLRDTSKNQFSLRLSSVTAADTAVYYCARSLARTTAMDYWGQGSLVTVSSASTKGPSVFPLAPSSKSTSGGTAALGCLVKDYFPEPVTVSWNSGALTSGVHTFPAVLQSSGLYSLSSVVTVPSSSLGTQTYICNVNHKPSNTKVDKKVEPKSCDKTHTCPPCPAPELLGGPSVFLFPPKPKDTLMISRTPEVTCVVVDVSHEDPEVKFNWYVDGVEVHNAKTKPREEQYNSTYRVVSVLTVLHQDWLNGKEYKCKVSNKALPAPIEKTISKAKGQPREPQVYTLPPSRDELTKNQVSLTCLVKGFYPSDIAVEWESNGQPENNYKTTPPVLDSDGSFFLYSKLTVDKSRWQQGNVFSCSVMHEALHNHYTQKSLSLSPGK

SEQ ID NO: 222 - protein, 379 aa, Homo sapiens; identical to SEQ ID NO: 214
  misc_feature: Anti-IL6R Antibody (Tocilizumab) - PD-1 ECD antibody-ligand trap
  misc_feature: Anti-IL6R Antibody (Tocilizumab) light chain + PD-1 ECD

SEQ ID NO: 223 - protein, 449 aa, Homo sapiens; identical to SEQ ID NO: 221
  misc_feature: Anti-IL6R Antibody (Tocilizumab) - TIM3 ECD antibody-ligand trap
  misc_feature: Anti-IL6R Antibody (Tocilizumab) heavy chain

SEQ ID NO: 224 - protein, 410 aa, Homo sapiens; identical to SEQ ID NO: 216
  misc_feature: Anti-IL6R Antibody (Tocilizumab) - TIM3 ECD antibody-ligand trap
  misc_feature: Anti-IL6R Antibody (Tocilizumab) light chain + TIM3 ECD

SEQ ID NO: 225 - protein, 601 aa, Homo sapiens
  misc_feature: Anti-EGFR Antibody (Cetuximab) - TGF beta RII ECD + PD-1 ECD antibody-ligand trap
  misc_feature: Anti-EGFR Antibody (Cetuximab) heavy chain + TGF beta RII ECD
QVQLKQSGPGLVQPSQSLSITCTVSGFSLTNYGVHWVRQSPGKGLEWLGVIWSGGNTDYNTPFTSRLSINKDNSKSQVFFKMNSLQSNDTAIYYCARALTYYDYEFAYWGQGTLVTVSAASTKGPSVFPLAPSSKSTSGGTAALGCLVKDYFPEPVTVSWNSGALTSGVHTFPAVLQSSGLYSLSSVVTVPSSSLGTQTYICNVNHKPSNTKVDKRVEPKSCDKTHTCPPCPAPELLGGPSVFLFPPKPKDTLMISRTPEVTCVVVDVSHEDPEVKFNWYVDGVEVHNAKTKPREEQYNSTYRVVSVLTVLHQDWLNGKEYKCKVSNKALPAPIEKTISKAKGQPREPQVYTLPPSRDELTKNQVSLTCLVKGFYPSDIAVEWESNGQPENNYKTTPPVLDSDGSFFLYSKLTVDKSRWQQGNVFSCSVMHEALHNHYTQKSLSLSPGKGGGGSGGGGSGGGGSTIPPHVQKSVNNDMIVTDNNGAVKFPQLCKFCDVRFSTCDNQKSCMSNCSITSICEKPQEVCVAVWRKNDENITLETVCHDPKLPYHDFILEDAASPKCIMKEKKKPGETFFMCSCSSDECNDNIIFSEEYNTSNPD

SEQ ID NO: 226 - protein, 379 aa, Homo sapiens
  misc_feature: Anti-EGFR Antibody (Cetuximab) - TGF beta RII ECD + PD-1 ECD antibody-ligand trap
  misc_feature: Anti-EGFR Antibody (Cetuximab) light chain + PD-1 ECD
DILLTQSPVILSVSPGERVSFSCRASQSIGTNIHWYQQRTNGSPRLLIKYASESISGIPSRFSGSGSGTDFTLSINSVESEDIADYYCQQNNNWPTTFGAGTKLELKRTVAAPSVFIFPPSDEQLKSGTASVVCLLNNFYPREAKVQWKVDNALQSGNSQESVTEQDSKDSTYSLSSTLTLSKADYEKHKVYACEVTHQGLSSPVTKSFNRGECGGGGSGGGGSGGGGSPGWFLDSPDRPWNPPTFSPALLVVTEGDNATFTCSFSNTSESFVLNWYRMSPSNQTDKLAAFPEDRSQPGQDCRFRVTQLPNGRDFHMSVVRARRNDSGTYLCGAISLAPKAQIKESLRAELRVTERRAEVPTAHPSPSPRPAGQFQTLV

SEQ ID NO: 227 - protein, 601 aa, Homo sapiens; identical to SEQ ID NO: 225
  misc_feature: Anti-EGFR Antibody (Cetuximab) - TGF beta RII ECD + TIM3 ECD antibody-ligand trap
  misc_feature: Anti-EGFR Antibody (Cetuximab) heavy chain + TGF beta RII ECD

SEQ ID NO: 228 - protein, 410 aa, Homo sapiens
  misc_feature: Anti-EGFR Antibody (Cetuximab) - TGF beta RII ECD + TIM3 ECD antibody-ligand trap
  misc_feature: Anti-EGFR Antibody (Cetuximab) light chain + TIM3 ECD
DILLTQSPVILSVSPGERVSFSCRASQSIGTNIHWYQQRTNGSPRLLIKYASESISGIPSRFSGSGSGTDFTLSINSVESEDIADYYCQQNNNWPTTFGAGTKLELKRTVAAPSVFIFPPSDEQLKSGTASVVCLLNNFYPREAKVQWKVDNALQSGNSQESVTEQDSKDSTYSLSSTLTLSKADYEKHKVYACEVTHQGLSSPVTKSFNRGECGGGGSGGGGSGGGGSSEVEYRAEVGQNAYLPCFYTPAAPGNLVPVCWGKGACPVFECGNVVLRTDERDVNYWTSRYWLNGDFRKGDVSLTIENVTLADSGIYCCRIQIPGIMNDEKFNLKLVIKPAKVTPAPTRQRDFTAAFPRMLTTRGHGPAETQTLGSLPDINLTQISTLANELRDSRLANDLRDSGATIRIG

SEQ ID NO: 229 - protein, 614 aa, Homo sapiens
  misc_feature: Anti-EGFR Antibody (Cetuximab) - PD-1 ECD + TIM3 ECD antibody-ligand trap
  misc_feature: Anti-EGFR Antibody (Cetuximab) heavy chain + PD-1 ECD
QVQLKQSGPGLVQPSQSLSITCTVSGFSLTNYGVHWVRQSPGKGLEWLGVIWSGGNTDYNTPFTSRLSINKDNSKSQVFFKMNSLQSNDTAIYYCARALTYYDYEFAYWGQGTLVTVSAASTKGPSVFPLAPSSKSTSGGTAALGCLVKDYFPEPVTVSWNSGALTSGVHTFPAVLQSSGLYSLSSVVTVPSSSLGTQTYICNVNHKPSNTKVDKRVEPKSCDKTHTCPPCPAPELLGGPSVFLFPPKPKDTLMISRTPEVTCVVVDVSHEDPEVKFNWYVDGVEVHNAKTKPREEQYNSTYRVVSVLTVLHQDWLNGKEYKCKVSNKALPAPIEKTISKAKGQPREPQVYTLPPSRDELTKNQVSLTCLVKGFYPSDIAVEWESNGQPENNYKTTPPVLDSDGSFFLYSKLTVDKSRWQQGNVFSCSVMHEALHNHYTQKSLSLSPGKGGGGSGGGGSGGGGSPGWFLDSPDRPWNPPTFSPALLVVTEGDNATFTCSFSNTSESFVLNWYRMSPSNQTDKLAAFPEDRSQPGQDCRFRVTQLPNGRDFHMSVVRARRNDSGTYLCGAISLAPKAQIKESLRAELRVTERRAEVPTAHPSPSPRPAGQFQTLV

SEQ ID NO: 230 - protein, 410 aa, Homo sapiens; identical to SEQ ID NO: 228
  misc_feature: Anti-EGFR Antibody (Cetuximab) - PD-1 ECD + TIM3 ECD antibody-ligand trap
  misc_feature: Anti-EGFR Antibody (Cetuximab) light chain + TIM3 ECD

SEQ ID NO: 231 - protein, 645 aa, Homo sapiens; identical to SEQ ID NO: 74
  misc_feature: Anti-EGFR Antibody (Cetuximab) - TIM3 ECD + PD-1 ECD antibody-ligand trap
  misc_feature: Anti-EGFR Antibody (Cetuximab) heavy chain + TIM3 ECD

SEQ ID NO: 232 - protein, 379 aa, Homo sapiens; identical to SEQ ID NO: 226
  misc_feature: Anti-EGFR Antibody (Cetuximab) - TIM3 ECD + PD-1 ECD antibody-ligand trap
  misc_feature: Anti-EGFR Antibody (Cetuximab) light chain + PD-1 ECD

SEQ ID NO: 233 - protein, 449 aa, Homo sapiens
  misc_feature: Anti-EGFR Antibody (Cetuximab) heavy chain
QVQLKQSGPGLVQPSQSLSITCTVSGFSLTNYGVHWVRQSPGKGLEWLGVIWSGGNTDYNTPFTSRLSINKDNSKSQVFFKMNSLQSNDTAIYYCARALTYYDYEFAYWGQGTLVTVSAASTKGPSVFPLAPSSKSTSGGTAALGCLVKDYFPEPVTVSWNSGALTSGVHTFPAVLQSSGLYSLSSVVTVPSSSLGTQTYICNVNHKPSNTKVDKRVEPKSCDKTHTCPPCPAPELLGGPSVFLFPPKPKDTLMISRTPEVTCVVVDVSHEDPEVKFNWYVDGVEVHNAKTKPREEQYNSTYRVVSVLTVLHQDWLNGKEYKCKVSNKALPAPIEKTISKAKGQPREPQVYTLPPSRDELTKNQVSLTCLVKGFYPSDIAVEWESNGQPENNYKTTPPVLDSDGSFFLYSKLTVDKSRWQQGNVFSCSVMHEALHNHYTQKSLSLSPGK

SEQ ID NO: 234 - protein, 379 aa, Homo sapiens; identical to SEQ ID NO: 226
  misc_feature: Anti-EGFR Antibody (Cetuximab) - PD-1 ECD antibody-ligand trap
  misc_feature: Anti-EGFR Antibody (Cetuximab) light chain + PD-1 ECD

SEQ ID NO: 235 - protein, 449 aa, Homo sapiens; identical to SEQ ID NO: 233
  misc_feature: Anti-EGFR Antibody (Cetuximab) - TIM3 ECD antibody-ligand trap
  misc_feature: Anti-EGFR Antibody (Cetuximab) heavy chain

SEQ ID NO: 236 - protein, 410 aa, Homo sapiens; identical to SEQ ID NO: 228
  misc_feature: Anti-EGFR Antibody (Cetuximab) - TIM3 ECD antibody-ligand trap
  misc_feature: Anti-EGFR Antibody (Cetuximab) light chain + TIM3 ECD

SEQ ID NO: 237 - protein, 602 aa, Homo sapiens
  misc_feature: Anti-HER2 Antibody (Trastuzumab) - TGF beta RII ECD + PD-1 ECD antibody-ligand trap
  misc_feature: Anti-HER2 Antibody (Trastuzumab) heavy chain + TGF beta RII ECD
EVQLVESGGGLVQPGGSLRLSCAASGFNIKDTYIHWVRQAPGKGLEWVARIYPTNGYTRYADSVKGRFTISADTSKNTAYLQMNSLRAEDTAVYYCSRWGGDGFYAMDYWGQGTLVTVSSASTKGPSVFPLAPSSKSTSGGTAALGCLVKDYFPEPVTVSWNSGALTSGVHTFPAVLQSSGLYSLSSVVTVPSSSLGTQTYICNVNHKPSNTKVDKKVEPKSCDKTHTCPPCPAPELLGGPSVFLFPPKPKDTLMISRTPEVTCVVVDVSHEDPEVKFNWYVDGVEVHNAKTKPREEQYNSTYRVVSVLTVLHQDWLNGKEYKCKVSNKALPAPIEKTISKAKGQPREPQVYTLPPSREEMTKNQVSLTCLVKGFYPSDIAVEWESNGQPENNYKTTPPVLDSDGSFFLYSKLTVDKSRWQQGNVFSCSVMHEALHNHYTQKSLSLSPGKGGGGSGGGGSGGGGSTIPPHVQKSVNNDMIVTDNNGAVKFPQLCKFCDVRFSTCDNQKSCMSNCSITSICEKPQEVCVAVWRKNDENITLETVCHDPKLPYHDFILEDAASPKCIMKEKKKPGETFFMCSCSSDECNDNIIFSEEYNTSNPD

SEQ ID NO: 238 - protein, 379 aa, Homo sapiens
  misc_feature: Anti-HER2 Antibody (Trastuzumab) - TGF beta RII ECD + PD-1 ECD antibody-ligand trap
  misc_feature: Anti-HER2 Antibody (Trastuzumab) light chain + PD-1 ECD
DIQMTQSPSSLSASVGDRVTITCRASQDVNTAVAWYQQKPGKAPKLLIYSASFLYSGVPSRFSGSRSGTDFTLTISSLQPEDFATYYCQQHYTTPPTFGQGTKVEIKRTVAAPSVFIFPPSDEQLKSGTASVVCLLNNFYPREAKVQWKVDNALQSGNSQESVTEQDSKDSTYSLSSTLTLSKADYEKHKVYACEVTHQGLSSPVTKSFNRGECGGGGSGGGGSGGGGSPGWFLDSPDRPWNPPTFSPALLVVTEGDNATFTCSFSNTSESFVLNWYRMSPSNQTDKLAAFPEDRSQPGQDCRFRVTQLPNGRDFHMSVVRARRNDSGTYLCGAISLAPKAQIKESLRAELRVTERRAEVPTAHPSPSPRPAGQFQTLV

SEQ ID NO: 239 - protein, 602 aa, Homo sapiens; identical to SEQ ID NO: 237
  misc_feature: Anti-HER2 Antibody (Trastuzumab) - TGF beta RII ECD + TIM3 ECD antibody-ligand trap
  misc_feature: Anti-HER2 Antibody (Trastuzumab) heavy chain + TGF beta RII ECD

SEQ ID NO: 240 - protein, 410 aa, Homo sapiens
  misc_feature: Anti-HER2 Antibody (Trastuzumab) - TGF beta RII ECD + TIM3 ECD antibody-ligand trap
  misc_feature: Anti-HER2 Antibody (Trastuzumab) light chain + TIM3 ECD
DIQMTQSPSSLSASVGDRVTITCRASQDVNTAVAWYQQKPGKAPKLLIYSASFLYSGVPSRFSGSRSGTDFTLTISSLQPEDFATYYCQQHYTTPPTFGQGTKVEIKRTVAAPSVFIFPPSDEQLKSGTASVVCLLNNFYPREAKVQWKVDNALQSGNSQESVTEQDSKDSTYSLSSTLTLSKADYEKHKVYACEVTHQGLSSPVTKSFNRGECGGGGSGGGGSGGGGSSEVEYRAEVGQNAYLPCFYTPAAPGNLVPVCWGKGACPVFECGNVVLRTDERDVNYWTSRYWLNGDFRKGDVSLTIENVTLADSGIYCCRIQIPGIMNDEKFNLKLVIKPAKVTPAPTRQRDFTAAFPRMLTTRGHGPAETQTLGSLPDINLTQISTLANELRDSRLANDLRDSGATIRIG

SEQ ID NO: 241 - protein, 615 aa, Homo sapiens
  misc_feature: Anti-HER2 Antibody (Trastuzumab) - PD-1 ECD + TIM3 ECD antibody-ligand trap
  misc_feature: Anti-HER2 Antibody (Trastuzumab) heavy chain + PD-1 ECD
EVQLVESGGGLVQPGGSLRLSCAASGFNIKDTYIHWVRQAPGKGLEWVARIYPTNGYTRYADSVKGRFTISADTSKNTAYLQMNSLRAEDTAVYYCSRWGGDGFYAMDYWGQGTLVTVSSASTKGPSVFPLAPSSKSTSGGTAALGCLVKDYFPEPVTVSWNSGALTSGVHTFPAVLQSSGLYSLSSVVTVPSSSLGTQTYICNVNHKPSNTKVDKKVEPKSCDKTHTCPPCPAPELLGGPSVFLFPPKPKDTLMISRTPEVTCVVVDVSHEDPEVKFNWYVDGVEVHNAKTKPREEQYNSTYRVVSVLTVLHQDWLNGKEYKCKVSNKALPAPIEKTISKAKGQPREPQVYTLPPSREEMTKNQVSLTCLVKGFYPSDIAVEWESNGQPENNYKTTPPVLDSDGSFFLYSKLTVDKSRWQQGNVFSCSVMHEALHNHYTQKSLSLSPGKGGGGSGGGGSGGGGSPGWFLDSPDRPWNPPTFSPALLVVTEGDNATFTCSFSNTSESFVLNWYRMSPSNQTDKLAAFPEDRSQPGQDCRFRVTQLPNGRDFHMSVVRARRNDSGTYLCGAISLAPKAQIKESLRAELRVTERRAEVPTAHPSPSPRPAGQFQTLV

SEQ ID NO: 242 - protein, 410 aa, Homo sapiens; identical to SEQ ID NO: 240
  misc_feature: Anti-HER2 Antibody (Trastuzumab) - PD-1 ECD + TIM3 ECD antibody-ligand trap
  misc_feature: Anti-HER2 Antibody (Trastuzumab) light chain + TIM3 ECD

SEQ ID NO: 243 - protein, 646 aa, Homo sapiens; identical to SEQ ID NO: 102
  misc_feature: Anti-HER2 Antibody (Trastuzumab) - TIM3 ECD + PD-1 ECD antibody-ligand trap
  misc_feature: Anti-HER2 Antibody (Trastuzumab) heavy chain + TIM3 ECD

SEQ ID NO: 244 - protein, 379 aa, Homo sapiens; identical to SEQ ID NO: 238
  misc_feature: Anti-HER2 Antibody (Trastuzumab) - TIM3 ECD + PD-1 ECD antibody-ligand trap
  misc_feature: Anti-HER2 Antibody (Trastuzumab) light chain + PD-1 ECD

SEQ ID NO: 245 - protein, 450 aa, Homo sapiens
  misc_feature: Anti-HER2 Antibody (Trastuzumab) - PD-1 ECD antibody-ligand trap
  misc_feature: Anti-HER2 Antibody (Trastuzumab) heavy chain
EVQLVESGGGLVQPGGSLRLSCAASGFNIKDTYIHWVRQAPGKGLEWVARIYPTNGYTRYADSVKGRFTISADTSKNTAYLQMNSLRAEDTAVYYCSRWGGDGFYAMDYWGQGTLVTVSSASTKGPSVFPLAPSSKSTSGGTAALGCLVKDYFPEPVTVSWNSGALTSGVHTFPAVLQSSGLYSLSSVVTVPSSSLGTQTYICNVNHKPSNTKVDKKVEPKSCDKTHTCPPCPAPELLGGPSVFLFPPKPKDTLMISRTPEVTCVVVDVSHEDPEVKFNWYVDGVEVHNAKTKPREEQYNSTYRVVSVLTVLHQDWLNGKEYKCKVSNKALPAPIEKTISKAKGQPREPQVYTLPPSREEMTKNQVSLTCLVKGFYPSDIAVEWESNGQPENNYKTTPPVLDSDGSFFLYSKLTVDKSRWQQGNVFSCSVMHEALHNHYTQKSLSLSPGK

SEQ ID NO: 246 - protein, 379 aa, Homo sapiens; identical to SEQ ID NO: 238
  misc_feature: Anti-HER2 Antibody (Trastuzumab) - PD-1 ECD antibody-ligand trap
  misc_feature: Anti-HER2 Antibody (Trastuzumab) light chain + PD-1 ECD

SEQ ID NO: 247 - protein, 450 aa, Homo sapiens; identical to SEQ ID NO: 245
  misc_feature: Anti-HER2 Antibody (Trastuzumab) - TIM3 ECD antibody-ligand trap
  misc_feature: Anti-HER2 Antibody (Trastuzumab) heavy chain

SEQ ID NO: 248 - protein, 410 aa, Homo sapiens; identical to SEQ ID NO: 240
  misc_feature: Anti-HER2 Antibody (Trastuzumab) - TIM3 ECD antibody-ligand trap
  misc_feature: Anti-HER2 Antibody (Trastuzumab) light chain + TIM3 ECD

SEQ ID NO: 249 - protein, 605 aa, Homo sapiens
  misc_feature: Anti-VEGF Antibody (Bevacizumab) - TGF beta RII ECD + PD-1 ECD antibody-ligand trap
  misc_feature: Anti-VEGF Antibody (Bevacizumab) heavy chain + TGF beta RII ECD
EVQLVESGGGLVQPGGSLRLSCAASGYTFTNYGMNWVRQAPGKGLEWVGWINTYTGEPTYAADFKRRFTFSLDTSKSTAYLQMNSLRAEDTAVYYCAKYPHYYGSSHWYFDVWGQGTLVTVSSASTKGPSVFPLAPSSKSTSGGTAALGCLVKDYFPEPVTVSWNSGALTSGVHTFPAVLQSSGLYSLSSVVTVPSSSLGTQTYICNVNHKPSNTKVDKKVEPKSCDKTHTCPPCPAPELLGGPSVFLFPPKPKDTLMISRTPEVTCVVVDVSHEDPEVKFNWYVDGVEVHNAKTKPREEQYNSTYRVVSVLTVLHQDWLNGKEYKCKVSNKALPAPIEKTISKAKGQPREPQVYTLPPSREEMTKNQVSLTCLVKGFYPSDIAVEWESNGQPENNYKTTPPVLDSDGSFFLYSKLTVDKSRWQQGNVFSCSVMHEALHNHYTQKSLSLSPGKGGGGSGGGGSGGGGSTIPPHVQKSVNNDMIVTDNNGAVKFPQLCKFCDVRFSTCDNQKSCMSNCSITSICEKPQEVCVAVWRKNDENITLETVCHDPKLPYHDFILEDAASPKCIMKEKKKPGETFFMCSCSSDECNDNIIFSEEYNTSNPD

SEQ ID NO: 250 - protein, 379 aa, Homo sapiens
  misc_feature: Anti-VEGF Antibody (Bevacizumab) - TGF beta RII ECD + PD-1 ECD antibody-ligand trap
  misc_feature: Anti-VEGF Antibody (Bevacizumab) light chain + PD-1 ECD
DIQMTQSPSSLSASVGDRVTITCSASQDISNYLNWYQQKPGKAPKVLIYFTSSLHSGVPSRFSGSGSGTDFTLTISSLQPEDFATYYCQQYSTVPWTFGQGTKVEIKRTVAAPSVFIFPPSDEQLKSGTASVVCLLNNFYPREAKVQWKVDNALQSGNSQESVTEQDSKDSTYSLSSTLTLSKADYEKHKVYACEVTHQGLSSPVTKSFNRGECGGGGSGGGGSGGGGSPGWFLDSPDRPWNPPTFSPALLVVTEGDNATFTCSFSNTSESFVLNWYRMSPSNQTDKLAAFPEDRSQPGQDCRFRVTQLPNGRDFHMSVVRARRNDSGTYLCGAISLAPKAQIKESLRAELRVTERRAEVPTAHPSPSPRPAGQFQTLV

SEQ ID NO: 251 - protein, 605 aa, Homo sapiens; identical to SEQ ID NO: 249
  misc_feature: Anti-VEGF Antibody (Bevacizumab) - TGF beta RII ECD + TIM3 ECD antibody-ligand trap
  misc_feature: Anti-VEGF Antibody (Bevacizumab) heavy chain + TGF beta RII ECD

SEQ ID NO: 252 - protein, 410 aa, Homo sapiens
  misc_feature: Anti-VEGF Antibody (Bevacizumab) - TGF beta RII ECD + TIM3 ECD antibody-ligand trap
  misc_feature: Anti-VEGF Antibody (Bevacizumab) light chain + TIM3 ECD
DIQMTQSPSSLSASVGDRVTITCSASQDISNYLNWYQQKPGKAPKVLIYFTSSLHSGVPSRFSGSGSGTDFTLTISSLQPEDFATYYCQQYSTVPWTFGQGTKVEIKRTVAAPSVFIFPPSDEQLKSGTASVVCLLNNFYPREAKVQWKVDNALQSGNSQESVTEQDSKDSTYSLSSTLTLSKADYEKHKVYACEVTHQGLSSPVTKSFNRGECGGGGSGGGGSGGGGSSEVEYRAEVGQNAYLPCFYTPAAPGNLVPVCWGKGACPVFECGNVVLRTDERDVNYWTSRYWLNGDFRKGDVSLTIENVTLADSGIYCCRIQIPGIMNDEKFNLKLVIKPAKVTPAPTRQRDFTAAFPRMLTTRGHGPAETQTLGSLPDINLTQISTLANELRDSRLANDLRDSGATIRIG

SEQ ID NO: 253 - protein, 618 aa, Homo sapiens
  misc_feature: Anti-VEGF Antibody (Bevacizumab) - PD-1 ECD + TIM3 ECD antibody-ligand trap
  misc_feature: Anti-VEGF Antibody (Bevacizumab) heavy chain + PD-1 E
EVQLVESGGGLVQPGGSLRLSCAASGYTFTNYGMNWVRQAPGKGLEWVGWINTYTGEPTYAADFKRRFTFSLDTSKSTAYLQMNSLRAEDTAVYYCAKYPHYYGSSHWYFDVWGQGTLVTVSSASTKGPSVFPLAPSSKSTSGGTAALGCLVKDYFPEPVTVSWNSGALTSGVHTFPAVLQSSGLYSLSSVVTVPSSSLGTQTYICNVNHKPSNTKVDKKVEPKSCDKTHTCPPCPAPELLGGPSVFLFPPKPKDTLMISRTPEVTCVVVDVSHEDPEVKFNWYVDGVEVHNAKTKPREEQYNSTYRVVSVLTVLHQDWLNGKEYKCKVSNKALPAPIEKTISKAKGQPREPQVYTLPPSREEMTKNQVSLTCLVKGFYPSDIAVEWESNGQPENNYKTTPPVLDSDGSFFLYSKLTVDKSRWQQGNVFSCSVMHEALHNHYTQKSLSLSPGKGGGGSGGGGSGGGGSPGWFLDSPDRPWNPPTFSPALLVVTEGDNATFTCSFSNTSESFVLNWYRMSPSNQTDKLAAFPEDRSQPGQDCRFRVTQLPNGRDFHMSVVRARRNDSGTYLCGAISLAPKAQIKESLRAELRVTERRAEVPTAHPSPSPRPAGQFQTLV

SEQ ID NO: 254 - protein, 410 aa, Homo sapiens; identical to SEQ ID NO: 252
  misc_feature: Anti-VEGF Antibody (Bevacizumab) - PD-1 ECD + TIM3 ECD antibody-ligand trap
  misc_feature: Anti-VEGF Antibody (Bevacizumab) light chain + TIM3 ECD

SEQ ID NO: 255 - protein, 649 aa, Homo sapiens; identical to SEQ ID NO: 88
  misc_feature: Anti-VEGF Antibody (Bevacizumab) - TIM3 ECD + PD-1 ECD antibody-ligand trap

SEQ ID NO: 256 - protein, 379 aa, Homo sapiens; identical to SEQ ID NO: 250
  misc_feature: Anti-VEGF Antibody (Bevacizumab) - TIM3 ECD + PD-1 ECD antibody-ligand trap
  misc_feature: Anti-VEGF Antibody (Bevacizumab) light chain + PD-1 ECD

SEQ ID NO: 257 - protein, 453 aa, Homo sapiens
  misc_feature: Anti-VEGF Antibody (Bevacizumab) - PD-1 ECD antibody-ligand trap
  misc_feature: Anti-VEGF Antibody (Bevacizumab) heavy chain
EVQLVESGGGLVQPGGSLRLSCAASGYTFTNYGMNWVRQAPGKGLEWVGWINTYTGEPTYAADFKRRFTFSLDTSKSTAYLQMNSLRAEDTAVYYCAKYPHYYGSSHWYFDVWGQGTLVTVSSASTKGPSVFPLAPSSKSTSGGTAALGCLVKDYFPEPVTVSWNSGALTSGVHTFPAVLQSSGLYSLSSVVTVPSSSLGTQTYICNVNHKPSNTKVDKKVEPKSCDKTHTCPPCPAPELLGGPSVFLFPPKPKDTLMISRTPEVTCVVVDVSHEDPEVKFNWYVDGVEVHNAKTKPREEQYNSTYRVVSVLTVLHQDWLNGKEYKCKVSNKALPAPIEKTISKAKGQPREPQVYTLPPSREEMTKNQVSLTCLVKGFYPSDIAVEWESNGQPENNYKTTPPVLDSDGSFFLYSKLTVDKSRWQQGNVFSCSVMHEALHNHYTQKSLSLSPGK

SEQ ID NO: 258 - protein, 379 aa, Homo sapiens; identical to SEQ ID NO: 250
  misc_feature: Anti-VEGF Antibody (Bevacizumab) - PD-1 ECD antibody-ligand trap
  misc_feature: Anti-VEGF Antibody (Bevacizumab) light chain + PD-1 ECD

SEQ ID NO: 259 - protein, 453 aa, Homo sapiens; identical to SEQ ID NO: 257
  misc_feature: Anti-VEGF Antibody (Bevacizumab) - TIM3 ECD antibody-ligand trap
  misc_feature: Anti-VEGF Antibody (Bevacizumab) heavy chain

SEQ ID NO: 260 - protein, 410 aa, Homo sapiens; identical to SEQ ID NO: 252
  misc_feature: Anti-VEGF Antibody (Bevacizumab) - TIM3 ECD antibody-ligand trap
  misc_feature: Anti-VEGF Antibody (Bevacizumab) light chain + TIM3 ECD

SEQ ID NO: 261 - protein, 608 aa, Homo sapiens
  misc_feature: Anti-gp120 Antibody (B12) - TGF beta RII ECD + PD-1 ECD antibody-ligand trap
  misc_feature: Anti-gp120 Antibody (B12) heavy chain + TGF beta RII ECD
QVQLVQSGAEVKKPGASVKVSCQASGYRFSNFVIHWVRQAPGQRFEWMGWINPYNGNKEFSAKFQDRVTFTADTSANTAYMELRSLRSADTAVYYCARVGPYSWDDSPQDNYYMDVWGKGTTVIVSSASTKGPSVFPLAPSSKSTSGGTAALGCLVKDYFPEPVTVSWNSGALTSGVHTFPAVLQSSGLYSLSSVVTVPSSSLGTQTYICNVNHKPSNTKVDKRVEPKSCDKTHTCPPCPAPELLGGPSVFLFPPKPKDTLMISRTPEVTCVVVDVSHEDPEVKFNWYVDGVEVHNAKTKPREEQYNSTYRVVSVLTVLHQDWLNGKEYKCKVSNKALPAPIEKTISKAKGQPREPQVYTLPPSREEMTKNQVSLTCLVKGFYSDIAVEWESNGQPENNYKTTPPVLDSDGSFFLYSKLTVDKSRWQQGNVFSCSVMHEALHNHYTQKSLSLSPGKGGGGSGGGGSGGGGSTIPPHVQKSVNNDMIVTDNNGAVKFPQLCKFCDVRFSTCDNQKSCMSNCSITSICEKPQEVCVAVWRKNDENITLETVCHDPKLPYHDFILEDAASPKCIMKEKKKPGETFFMCSCSSDECNDNIIFSEEYNTSNPD

SEQ ID NO: 262 - protein, 380 aa, Homo sapiens
  misc_feature: Anti-gp120 Antibody (B12) - TGF beta RII ECD + PD-1 ECD antibody-ligand trap
  misc_feature: Anti-gp120 Antibody (B12) light chain + PD-1 ECD
EIVLTQSPGTLSLSPGERATFSCRSSHSIRSRRVAWYQHKPGQAPRLVIHGVSNRASGISDRFSGSGSGTDFTLTITRVEPEDFALYYCQVYGASSYTFGQGTKLERKRTVAAPSVFIFPPSDEQLKSGTASVVCLLNNFYPREAKVQWKVDNALQSGNSQESVTEQDSKDSTYSLSSTLTLSKADYEKHKVYACEVTHQGLSSPVTKSFNRGECGGGGSGGGGSGGGGSPGWFLDSPDRPWNPPTFSPALLVVTEGDNATFTCSFSNTSESFVLNWYRMSPSNQTDKLAAFPEDRSQPGQDCRFRVTQLPNGRDFHMSVVRARRNDSGTYLCGAISLAPKAQIKESLRAELRVTERRAEVPTAHPSPSPRPAGQFQTLV

SEQ ID NO: 263 - protein, 608 aa, Homo sapiens; identical to SEQ ID NO: 261
  misc_feature: Anti-gp120 Antibody (B12) - TGF beta RII ECD + TIM3 ECD antibody-ligand trap
  misc_feature: Anti-gp120 Antibody (B12) heavy chain + TGF beta RII ECD

SEQ ID NO: 264 - protein, 411 aa, Homo sapiens
  misc_feature: Anti-gp120 Antibody (B12) - TGF beta RII ECD + TIM3 ECD antibody-ligand trap
  misc_feature: Anti-gp120 Antibody (B12) light chain + TIM3 ECD
EIVLTQSPGTLSLSPGERATFSCRSSHSIRSRRVAWYQHKPGQAPRLVIHGVSNRASGISDRFSGSGSGTDFTLTITRVEPEDFALYYCQVYGASSYTFGQGTKLERKRTVAAPSVFIFPPSDEQLKSGTASVVCLLNNFYPREAKVQWKVDNALQSGNSQESVTEQDSKDSTYSLSSTLTLSKADYEKHKVYACEVTHQGLSSPVTKSFNRGECGGGGSGGGGSGGGGSSEVEYRAEVGQNAYLPCFYTPAAPGNLVPVCWGKGACPVFECGNVVLRTDERDVNYWTSRYWLNGDFRKGDVSLTIENVTLADSGIYCCRIQIPGIMNDEKFNLKLVIKPAKVTPAPTRQRDFTAAFPRMLTTRGHGPAETQTLGSLPDINLTQISTLANELRDSRLANDLRDSGATIRIG

SEQ ID NO: 265 - protein, 621 aa, Homo sapiens
  misc_feature: Anti-gp120 Antibody (B12) - PD-1 ECD + TIM3 ECD antibody-ligand trap
  misc_feature: Anti-gp120 Antibody (B12) heavy chain + PD-1 ECD
QVQLVQSGAEVKKPGASVKVSCQASGYRFSNFVIHWVRQAPGQRFEWMGWINPYNGNKEFSAKFQDRVTFTADTSANTAYMELRSLRSADTAVYYCARVGPYSWDDSPQDNYYMDVWGKGTTVIVSSASTKGPSVFPLAPSSKSTSGGTAALGCLVKDYFPEPVTVSWNSGALTSGVHTFPAVLQSSGLYSLSSVVTVPSSSLGTQTYICNVNHKPSNTKVDKRVEPKSCDKTHTCPPCPAPELLGGPSVFLFPPKPKDTLMISRTPEVTCVVVDVSHEDPEVKFNWYVDGVEVHNAKTKPREEQYNSTYRVVSVLTVLHQDWLNGKEYKCKVSNKALPAPIEKTISKAKGQPREPQVYTLPPSREEMTKNQVSLTCLVKGFYSDIAVEWESNGQPENNYKTTPPVLDSDGSFFLYSKLTVDKSRWQQGNVFSCSVMHEALHNHYTQKSLSLSPGKGGGGSGGGGSGGGGSPGWFLDSPDRPWNPPTFSPALLVVTEGDNATFTCSFSNTSESFVLNWYRMSPSNQTDKLAAFPEDRSQPGQDCRFRVTQLPNGRDFHMSVVRARRNDSGTYLCGAISLAPKAQIKESLRAELRVTERRAEVPTAHPSPSPRPAGQFQTLV

SEQ ID NO: 266 - protein, 411 aa, Homo sapiens; identical to SEQ ID NO: 264
  misc_feature: Anti-gp120 Antibody (B12) - PD-1 ECD + TIM3 ECD antibody-ligand trap
  misc_feature: Anti-gp120 Antibody (B12) light chain + TIM3 ECD

SEQ ID NO: 267 - protein, 652 aa, Homo sapiens
  misc_feature: Anti-gp120 Antibody (B12) - TIM3 ECD + PD-1 ECD antibody-ligand trap
  misc_feature: Anti-gp120 Antibody (B12) heavy chain + TIM3 ECD
QVQLVQSGAEVKKPGASVKVSCQASGYRFSNFVIHWVRQAPGQRFEWMGWINPYNGNKEFSAKFQDRVTFTADTSANTAYMELRSLRSADTAVYYCARVGPYSWDDSPQDNYYMDVWGKGTTVIVSSASTKGPSVFPLAPSSKSTSGGTAALGCLVKDYFPEPVTVSWNSGALTSGVHTFPAVLQSSGLYSLSSVVTVPSSSLGTQTYICNVNHKPSNTKVDKRVEPKSCDKTHTCPPCPAPELLGGPSVFLFPPKPKDTLMISRTPEVTCVVVDVSHEDPEVKFNWYVDGVEVHNAKTKPREEQYNSTYRVVSVLTVLHQDWLNGKEYKCKVSNKALPAPIEKTISKAKGQPREPQVYTLPPSREEMTKNQVSLTCLVKGFYSDIAVEWESNGQPENNYKTTPPVLDSDGSFFLYSKLTVDKSRWQQGNVFSCSVMHEALHNHYTQKSLSLSPGKGGGGSGGGGSGGGGSSEVEYRAEVGQNAYLPCFYTPAAPGNLVPVCWGKGACPVFECGNVVLRTDERDVNYWTSRYWLNGDFRKGDVSLTIENVTLADSGIYCCRIQIPGIMNDEKFNLKLVIKPAKVTPAPTRQRDFTAAFPRMLTTRGHGPAETQTLGSLPDINLTQISTLANELRDSRLANDLRDSGATIRIG

SEQ ID NO: 268 - protein, 380 aa, Homo sapiens; identical to SEQ ID NO: 262
  misc_feature: Anti-gp120 Antibody (B12) - TIM3 ECD + PD-1 ECD antibody-ligand trap
  misc_feature: Anti-gp120 Antibody (B12) light chain + PD-1 ECD

SEQ ID NO: 269 - protein, 456 aa, Homo sapiens
  misc_feature: Anti-gp120 Antibody (B12) - PD-1 ECD antibody-ligand trap
  misc_feature: Anti-gp120 Antibody (B12) heavy chain
QVQLVQSGAEVKKPGASVKVSCQASGYRFSNFVIHWVRQAPGQRFEWMGWINPYNGNKEFSAKFQDRVTFTADTSANTAYMELRSLRSADTAVYYCARVGPYSWDDSPQDNYYMDVWGKGTTVIVSSASTKGPSVFPLAPSSKSTSGGTAALGCLVKDYFPEPVTVSWNSGALTSGVHTFPAVLQSSGLYSLSSVVTVPSSSLGTQTYICNVNHKPSNTKVDKRVEPKSCDKTHTCPPCPAPELLGGPSVFLFPPKPKDTLMISRTPEVTCVVVDVSHEDPEVKFNWYVDGVEVHNAKTKPREEQYNSTYRVVSVLTVLHQDWLNGKEYKCKVSNKALPAPIEKTISKAKGQPREPQVYTLPPSREEMTKNQVSLTCLVKGFYSDIAVEWESNGQPENNYKTTPPVLDSDGSFFLYSKLTVDKSRWQQGNVFSCSVMHEALHNHYTQKSLSLSPGK

SEQ ID NO: 270 - protein, 380 aa, Homo sapiens; identical to SEQ ID NO: 262
  misc_feature: Anti-gp120 Antibody (B12) - PD-1 ECD antibody-ligand trap
  misc_feature: Anti-gp120 Antibody (B12) light chain + PD-1 ECD

SEQ ID NO: 271 - protein, 456 aa, Homo sapiens; identical to SEQ ID NO: 269
  misc_feature: Anti-gp120 Antibody (B12) - TIM3 ECD antibody-ligand trap
  misc_feature: Anti-gp120 Antibody (B12) heavy chain

SEQ ID NO: 272 - protein, 411 aa, Homo sapiens; identical to SEQ ID NO: 264
  misc_feature: Anti-gp120 Antibody (B12) - TIM3 ECD antibody-ligand trap
  misc_feature: Anti-gp120 Antibody (B12) light chain + TIM3 ECD

SEQ ID NO: 273 - protein, 592 aa, Homo sapiens
  misc_feature: Anti-PD1 Antibody (Nivolumab) - TGF beta RII ECD + TIM3 ECD antibody-ligand trap
  misc_feature: Anti-PD1 Antibody (Nivolumab) heavy chain + TGF beta RII ECD
QVQLVESGGGVVQPGRSLRLDCKASGITFSNSGMHWVRQAPGKGLEWVAVIWYDGSKRYYADSVKGRFTISRDNSKNTLFLQMNSLRAEDTAVYYCATNDDYWGQGTLVTVSSASTKGPSVFPLAPCSRSTSESTAALGCLVKDYFPEPVTVSWNSGALTSGVHTFPAVLQSSGLYSLSSVVTVPSSSLGTKTYTCNVDHKPSNTKVDKRVESKYGPPCPPCPAPEFLGGPSVFLFPPKPKDTLMISRTPEVTCVVVDVSQEDPEVQFNWYVDGVEVHNAKTKPREEQFNSTYRVVSVLTVLHQDWLNGKEYKCKVSNKGLPSSIEKTISKAKGQPREPQVYTLPPSQEEMTKNQVSLTCLVKGFYPSDIAVEWESNGQPENNYKTTPPVLDSDGSFFLYSRLTVDKSRWQEGNVFSCSVMHEALHNHYTQKSLSLSLGKGGGGSGGGGSGGGGSTIPPHVQKSVNNDMIVTDNNGAVKFPQLCKFCDVRFSTCDNQKSCMSNCSITSICEKPQEVCVAVWRKNDENITLETVCHDPKLPYHDFILEDAASPKCIMKEKKKPGETFFMCSCSSDECNDNIIFSEEYNTSNPD

SEQ ID NO: 274 - protein, 410 aa, Homo sapiens
  misc_feature: Anti-PD1 Antibody (Nivolumab) - TGF beta RII ECD + TIM3 ECD antibody-ligand trap
  misc_feature: Anti-PD1 Antibody (Nivolumab) heavy chain + TGF beta RII EC
EIVLTQSPATLSLSPGERATLSCRASQSVSSYLAWYQQKPGQAPRLLIYDASNRATGIPARFSGSGSGTDFTLTISSLEPEDFAVYYCQQSSNWPRTFGQGTKVEIKRTVAAPSVFIFPPSDEQLKSGTASVVCLLNNFYPREAKVQWKVDNALQSGNSQESVTEQDSKDSTYSLSSTLTLSKADYEKHKVYACEVTHQGLSSPVTKSFNRGECGGGGSGGGGSGGGGSSEVEYRAEVGQNAYLPCFYTPAAPGNLVPVCWGKGACPVFECGNVVLRTDERDVNYWTSRYWLNGDFRKGDVSLTIENVTLADSGIYCCRIQIPGIMNDEKFNLKLVIKPAKVTPAPTRQRDFTAAFPRMLTTRGHGPAETQTLGSLPDINLTQISTLANELRDSRLANDLRDSGATIRIG

SEQ ID NO: 275 - protein, 440 aa, Homo sapiens
  misc_feature: Anti-PD1 Antibody (Nivolumab) - TIM3 ECD antibody-ligand trap
  misc_feature: Anti-PD1 Antibody (Nivolumab) heavy chain
QVQLVESGGGVVQPGRSLRLDCKASGITFSNSGMHWVRQAPGKGLEWVAVIWYDGSKRYYADSVKGRFTISRDNSKNTLFLQMNSLRAEDTAVYYCATNDDYWGQGTLVTVSSASTKGPSVFPLAPCSRSTSESTAALGCLVKDYFPEPVTVSWNSGALTSGVHTFPAVLQSSGLYSLSSVVTVPSSSLGTKTYTCNVDHKPSNTKVDKRVESKYGPPCPPCPAPEFLGGPSVFLFPPKPKDTLMISRTPEVTCVVVDVSQEDPEVQFNWYVDGVEVHNAKTKPREEQFNSTYRVVSVLTVLHQDWLNGKEYKCKVSNKGLPSSIEKTISKAKGQPREPQVYTLPPSQEEMTKNQVSLTCLVKGFYPSDIAVEWESNGQPENNYKTTPPVLDSDGSFFLYSRLTVDKSRWQEGNVFSCSVMHEALHNHYTQKSLSLSLGK

SEQ ID NO: 276 - protein, 410 aa, Homo sapiens; identical to SEQ ID NO: 274
  misc_feature: Anti-PD1 Antibody (Nivolumab) - TIM3 ECD antibody-ligand trap
  misc_feature: Anti-PD1 Antibody (Nivolumab) light chain + TIM3 ECD

SEQ ID NO: 277 - protein, 599 aa, Homo sapiens
  misc_feature: Anti-PD1 Antibody (Pembrolizumab) - TGF beta RII ECD + TIM3 ECD antibody-ligand trap
  misc_feature: Anti-PD1 Antibody (Pembrolizumab) heavy chain + TGF beta RII ECD
QVQLVQSGVEVKKPGASVKVSCKASGYTFTNYYMYWVRQAPGQGLEWMGGINPSNGGTNFNEKFKNRVTLTTDSSTTTAYMELKSLQFDDTAVYYCARRDYRFDMGFDYWGQGTTVTVSSASTKGPSVFPLAPCSRSTSESTAALGCLVKDYFPEPVTVSWNSGALTSGVHTFPAVLQSSGLYSLSSVVTVPSSSLGTKTYTCNVDHKPSNTKVDKRVESKYGPPCPPCPAPEFLGGPSVFLFPPKPKDTLMISRTPEVTCVVVDVSQEDPEVQFNWYVDGVEVHNAKTKPREEQFNSTYRVVSVLTVLHQDWLNGKEYKCKVSNKGLPSSIEKTISKAKGQPREPQVYTLPPSQEEMTKNQVSLTCLVKGFYPSDIAVEWESNGQPENNYKTTPPVLDSDGSFFLYSRLTVDKSRWQEGNVFSCSVMHEALHNHYTQKSLSLSLGKGGGGSGGGGSGGGGSTIPPHVQKSVNNDMIVTDNNGAVKFPQLCKFCDVRFSTCDNQKSCMSNCSITSICEKPQEVCVAVWRKNDENITLETVCHDPKLPYHDFILEDAASPKCIMKEKKKPGETFFMCSCSSDECNDNIIFSEEYNTSNPD

SEQ ID NO: 278 - protein, 414 aa, Homo sapiens
  misc_feature: Anti-PD1 Antibody (Pembrolizumab) - TGF beta RII ECD + TIM3 ECD antibody-ligand trap
  misc_feature: Anti-PD1 Antibody (Pembrolizumab) light chain + TIM3 ECD
EIVLTQSPATLSLSPGERATLSCRASKGVSTSGYSYLHWYQQKPGQAPRLLIYLASYLESGVPARFSGSGSGTDFTLTISSLEPEDFAVYYCQHSRDLPLTFGGGTKVEIKRTVAAPSVFIFPPSDEQLKSGTASVVCLLNNFYPREAKVQWKVDNALQSGNSQESVTEQDSKDSTYSLSSTLTLSKADYEKHKVYACEVTHQGLSSPVTKSFNRGECGGGGSGGGGSGGGGSSEVEYRAEVGQNAYLPCFYTPAAPGNLVPVCWGKGACPVFECGNVVLRTDERDVNYWTSRYWLNGDFRKGDVSLTIENVTLADSGIYCCRIQIPGIMNDEKFNLKLVIKPAKVTPAPTRQRDFTAAFPRMLTTRGHGPAETQTLGSLPDINLTQISTLANELRDSRLANDLRDSGATIRIG

SEQ ID NO: 279 - protein, 447 aa, Homo sapiens
  misc_feature: Anti-PD1 Antibody (Pembrolizumab) - TIM3 ECD antibody-ligand trap
  misc_feature: Anti-PD1 Antibody (Pembrolizumab) heavy chain
QVQLVQSGVEVKKPGASVKVSCKASGYTFTNYYMYWVRQAPGQGLEWMGGINPSNGGTNFNEKFKNRVTLTTDSSTTTAYMELKSLQFDDTAVYYCARRDYRFDMGFDYWGQGTTVTVSSASTKGPSVFPLAPCSRSTSESTAALGCLVKDYFPEPVTVSWNSGALTSGVHTFPAVLQSSGLYSLSSVVTVPSSSLGTKTYTCNVDHKPSNTKVDKRVESKYGPPCPPCPAPEFLGGPSVFLFPPKPKDTLMISRTPEVTCVVVDVSQEDPEVQFNWYVDGVEVHNAKTKPREEQFNSTYRVVSVLTVLHQDWLNGKEYKCKVSNKGLPSSIEKTISKAKGQPREPQVYTLPPSQEEMTKNQVSLTCLVKGFYPSDIAVEWESNGQPENNYKTTPPVLDSDGSFFLYSRLTVDKSRWQEGNVFSCSVMHEALHNHYTQKSLSLSLGK

SEQ ID NO: 280 - protein, 414 aa, Homo sapiens; identical to SEQ ID NO: 278
  misc_feature: Anti-PD1 Antibody (Pembrolizumab) - TIM3 ECD antibody-ligand trap
  misc_feature: Anti-PD1 Antibody (Pembrolizumab) light chain + TIM3 ECD

SEQ ID NO: 281 - protein, 600 aa, Homo sapiens
  misc_feature: Anti-PDL1 Antibody (Atezolizumab) - TGF beta RII ECD + TIM3 ECD antibody-ligand trap
  misc_feature: Anti-PDL1 Antibody (Atezolizumab) heavy chain + TGF beta RII ECD
EVQLVESGGGLVQPGGSLRLSCAASGFTFSDSWIHWVRQAPGKGLEWVAWISPYGGSTYYADSVKGRFTISADTSKNTAYLQMNSLRAEDTAVYYCARRHWPGGFDYWGQGTLVTVSAASTKGPSVFPLAPSSKSTSGGTAALGCLVKDYFPEPVTVSWNSGALTSGVHTFPAVLQSSGLYSLSSVVTVPSSSLGTQTYICNVNHKPSNTKVDKKVEPKSCDKTHTCPPCPAPELLGGPSVFLFPPKPKDTLMISRTPEVTCVVVDVSHEDPEVKFNWYVDGVEVHNAKTKPREEQYASTYRVVSVLTVLHQDWLNGKEYKCKVSNKALPAPIEKTISKAKGQPREPQVYTLPPSREEMTKNQVSLTCLVKGFYPSDIAVEWESNGQPENNYKTTPPVLDSDGSFFLYSKLTVDKSRWQQGNVFSCSVMHEALHNHYTQKSLSLSPGKGGGGSGGGGSGGGGSTIPPHVQKSVNNDMIVTDNNGAVKFPQLCKFCDVRFSTCDNQKSCMSNCSITSICEKPQEVCVAVWRKNDENITLETVCHDPKLPYHDFILEDAASPKCIMKEKKKPGETFFMCSCSSDECNDNIIFSEEYNTSNPD

SEQ ID NO: 282 - protein, 410 aa, Homo sapiens
  misc_feature: Anti-PDL1 Antibody (Atezolizumab) - TGF beta RII ECD + TIM3 ECD antibody-ligand trap
  misc_feature: Anti-PDL1 Antibody (Atezolizumab) light chain + TIM3 ECD
DIQMTQSPSSLSASVGDRVTITCRASQDVSTAVAWYQQKPGKAPKLLIYSASFLYSGVPSRFSGSGSGTDFTLTISSLQPEDFATYYCQQYLYHPATFGQGTKVEIKRTVAAPSVFIFPPSDEQLKSGTASVVCLLNNFYPREAKVQWKVDNALQSGNSQESVTEQDSKDSTYSLSSTLTLSKADYEKHKVYACEVTHQGLSSPVTKSFNRGECGGGGSGGGGSGGGGSSEVEYRAEVGQNAYLPCFYTPAAPGNLVPVCWGKGACPVFECGNVVLRTDERDVNYWTSRYWLNGDFRKGDVSLTIENVTLADSGIYCCRIQIPGIMNDEKFNLKLVIKPAKVTPAPTRQRDFTAAFPRMLTTRGHGPAETQTLGSLPDINLTQISTLANELRDSRLANDLRDSGATIRIG

SEQ ID NO: 283 - protein, 448 aa, Homo sapiens
  misc_feature: Anti-PDL1 Antibody (Atezolizumab) - TIM3 ECD antibody-ligand trap
  misc_feature: Anti-PDL1 Antibody (Atezolizumab) heavy chain
EVQLVESGGGLVQPGGSLRLSCAASGFTFSDSWIHWVRQAPGKGLEWVAWISPYGGSTYYADSVKGRFTISADTSKNTAYLQMNSLRAEDTAVYYCARRHWPGGFDYWGQGTLVTVSAASTKGPSVFPLAPSSKSTSGGTAALGCLVKDYFPEPVTVSWNSGALTSGVHTFPAVLQSSGLYSLSSVVTVPSSSLGTQTYICNVNHKPSNTKVDKKVEPKSCDKTHTCPPCPAPELLGGPSVFLFPPKPKDTLMISRTPEVTCVVVDVSHEDPEVKFNWYVDGVEVHNAKTKPREEQYASTYRVVSVLTVLHQDWLNGKEYKCKVSNKALPAPIEKTISKAKGQPREPQVYTLPPSREEMTKNQVSLTCLVKGFYPSDIAVEWESNGQPENNYKTTPPVLDSDGSFFLYSKLTVDKSRWQQGNVFSCSVMHEALHNHYTQKSLSLSPGK

SEQ ID NO: 284 - protein, 410 aa, Homo sapiens; identical to SEQ ID NO: 282
  misc_feature: Anti-PDL1 Antibody (Atezolizumab) - TIM3 ECD antibody-ligand trap
  misc_feature: Anti-PDL1 Antibody (Atezolizumab) light chain + TIM3 ECD

SEQ ID NO: 285 - protein, 602 aa, Homo sapiens
  misc_feature: Anti-PDL1 Antibody (Avelumab) - TGF beta RII ECD + TIM3 ECD antibody-ligand trap
  misc_feature: Anti-PDL1 Antibody (Avelumab) heavy chain + TGF beta RII ECD
EVQLLESGGGLVQPGGSLRLSCAASGFTFSSYIMMWVRQAPGKGLEWVSSIYPSGGITFYADTVKGRFTISRDNSKNTLYLQMNSLRAEDTAVYYCARIKLGTVTTVDYWGQGTLVTVSSASTKGPSVFPLAPSSKSTSGGTAALGCLVKDYFPEPVTVSWNSGALTSGVHTFPAVLQSSGLYSLSSVVTVPSSSLGTQTYICNVNHKPSNTKVDKRVEPKSCDKTHTCPPCPAPELLGGPSVFLFPPKPKDTLMISRTPEVTCVVVDVSHEDPEVKFNWYVDGVEVHNAKTKPREEQYNSTYRVVSVLTVLHQDWLNGKEYKCKVSNKALPAPIEKTISKAKGQPREPQVYTLPPSREEMTKNQVSLTCLVKGFYPSDIAVEWESNGQPENNYKTTPPVLDSDGSFFLYSKLTVDKSRWQQGNVFSCSVMHEALHNHYTQKSLSLSPGKGGGGSGGGGSGGGGSTIPPHVQKSVNNDMIVTDNNGAVKFPQLCKFCDVRFSTCDNQKSCMSNCSITSICEKPQEVCVAVWRKNDENITLETVCHDPKLPYHDFILEDAASPKCIMKEKKKPGETFFMCSCSSDECNDNIIFSEEYNTSNPD

SEQ ID NO: 286 - protein, 412 aa, Homo sapiens
  misc_feature: Anti-PDL1 Antibody (Avelumab) - TGF beta RII ECD + TIM3 ECD antibody-ligand trap
  misc_feature: Anti-PDL1 Antibody (Avelumab) light chain + TIM3 ECD
QSALTQPASVSGSPGQSITISCTGTSSDVGGYNYVSWYQQHPGKAPKLMIYDVSNRPSGVSNRFSGSKSGNTASLTISGLQAEDEADYYCSSYTSSSTRVFGTGTKVTVLGQPKANPTVTLFPPSSEELQANKATLVCLISDFYPGAVTVAWKADGSPVKAGVETTKPSKQSNNKYAASSYLSLTPEQWKSHRSYSCQVTHEGSTVEKTVAPTECSGGGGSGGGGSGGGGSSEVEYRAEVGQNAYLPCFYTPAAPGNLVPVCWGKGACPVFECGNVVLRTDERDVNYWTSRYWLNGDFRKGDVSLTIENVTLADSGIYCCRIQIPGIMNDEKFNLKLVIKPAKVTPAPTRQRDFTAAFPRMLTTRGHGPAETQTLGSLPDINLTQISTLANELRDSRLANDLRDSGATIRIG

SEQ ID NO: 287 - protein, 450 aa, Homo sapiens
  misc_feature: Anti-PDL1 Antibody (Avelumab) - TIM3 ECD antibody-ligand trap
  misc_feature: Anti-PDL1 Antibody (Avelumab) heavy chain
EVQLLESGGGLVQPGGSLRLSCAASGFTFSSYIMMWVRQAPGKGLEWVSSIYPSGGITFYADTVKGRFTISRDNSKNTLYLQMNSLRAEDTAVYYCARIKLGTVTTVDYWGQGTLVTVSSASTKGPSVFPLAPSSKSTSGGTAALGCLVKDYFPEPVTVSWNSGALTSGVHTFPAVLQSSGLYSLSSVVTVPSSSLGTQTYICNVNHKPSNTKVDKRVEPKSCDKTHTCPPCPAPELLGGPSVFLFPPKPKDTLMISRTPEVTCVVVDVSHEDPEVKFNWYVDGVEVHNAKTKPREEQYNSTYRVVSVLTVLHQDWLNGKEYKCKVSNKALPAPIEKTISKAKGQPREPQVYTLPPSREEMTKNQVSLTCLVKGFYPSDIAVEWESNGQPENNYKTTPPVLDSDGSFFLYSKLTVDKSRWQQGNVFSCSVMHEALHNHYTQKSLSLSPGK

SEQ ID NO: 288 - protein, 412 aa, Homo sapiens; identical to SEQ ID NO: 286
  misc_feature: Anti-PDL1 Antibody (Avelumab) - TIM3 ECD antibody-ligand trap
  misc_feature: Anti-PDL1 Antibody (Avelumab) light chain + TIM3 ECD

SEQ ID NO: 289 - protein, 120 aa, Homo sapiens
  misc_feature: Anti-PDL1 Antibody (Avelumab) - TIM3 ECD antibody-ligand trap
  misc_feature: Extracellular domain of TIGIT
MMTGTIETTGNISAEKGGSIILQCHLSSTTAQVTQVNWEQQDQLLAICNADLGWHISPSFKDRVAPGPGLGLTLQSLTVNDTGEYFCIYHTYPDGTYTGRIFLEVLESSVAEHGARFQIP

SEQ ID NO: 290 - protein, 575 aa, Homo sapiens
  misc_feature: Anti-PD1 Antibody (Nivolumab) - TIGIT ECD antibody-ligand trap
  misc_feature: Anti-PD1 Antibody (Nivolumab) heavy chain + TIGIT ECD
QVQLVESGGGVVQPGRSLRLDCKASGITFSNSGMHWVRQAPGKGLEWVAVIWYDGSKRYYADSVKGRFTISRDNSKNTLFLQMNSLRAEDTAVYYCATNDDYWGQGTLVTVSSASTKGPSVFPLAPCSRSTSESTAALGCLVKDYFPEPVTVSWNSGALTSGVHTFPAVLQSSGLYSLSSVVTVPSSSLGTKTYTCNVDHKPSNTKVDKRVESKYGPPCPPCPAPEFLGGPSVFLFPPKPKDTLMISRTPEVTCVVVDVSQEDPEVQFNWYVDGVEVHNAKTKPREEQFNSTYRVVSVLTVLHQDWLNGKEYKCKVSNKGLPSSIEKTISKAKGQPREPQVYTLPPSQEEMTKNQVSLTCLVKGFYPSDIAVEWESNGQPENNYKTTPPVLDSDGSFFLYSRLTVDKSRWQEGNVFSCSVMHEALHNHYTQKSLSLSLGKGGGGSGGGGSGGGGSMMTGTIETTGNISAEKGGSIILQCHLSSTTAQVTQVNWEQQDQLLAICNADLGWHISPSFKDRVAPGPGLGLTLQSLTVNDTGEYFCIYHTYPDGTYTGRIFLEVLESSVAEHGARFQIP

SEQ ID NO: 291 - protein, 214 aa, Homo sapiens; identical to SEQ ID NO: 169
  misc_feature: Anti-PD1 Antibody (Nivolumab) - TIGIT ECD antibody-ligand trap
  misc_feature: Anti-PD1 Antibody (Nivolumab) light chain

SEQ ID NO: 292 - protein, 582 aa, Homo sapiens
  misc_feature: Anti-PD1 Antibody (Pembrolizumab) - TIGIT ECD antibody-ligand trap
  misc_feature: Anti-PD1 Antibody (Pembrolizumab) heavy chain + TIGIT ECD
QVQLVQSGVEVKKPGASVKVSCKASGYTFTNYYMYWVRQAPGQGLEWMGGINPSNGGTNFNEKFKNRVTLTTDSSTTTAYMELKSLQFDDTAVYYCARRDYRFDMGFDYWGQGTTVTVSSASTKGPSVFPLAPCSRSTSESTAALGCLVKDYFPEPVTVSWNSGALTSGVHTFPAVLQSSGLYSLSSVVTVPSSSLGTKTYTCNVDHKPSNTKVDKRVESKYGPPCPPCPAPEFLGGPSVFLFPPKPKDTLMISRTPEVTCVVVDVSQEDPEVQFNWYVDGVEVHNAKTKPREEQFNSTYRVVSVLTVLHQDWLNGKEYKCKVSNKGLPSSIEKTISKAKGQPREPQVYTLPPSQEEMTKNQVSLTCLVKGFYPSDIAVEWESNGQPENNYKTTPPVLDSDGSFFLYSRLTVDKSRWQEGNVFSCSVMHEALHNHYTQKSLSLSLGKGGGGSGGGGSGGGGSMMTGTIETTGNISAEKGGSIILQCHLSSTTAQVTQVNWEQQDQLLAICNADLGWHISPSFKDRVAPGPGLGLTLQSLTVNDTGEYFCIYHTYPDGTYTGRIFLEVLESSVAEHGARFQIP

SEQ ID NO: 293 - protein, 218 aa, Homo sapiens; identical to SEQ ID NO: 179
  misc_feature: Anti-PD1 Antibody (Pembrolizumab) - TIGIT ECD antibody-ligand trap
  misc_feature: Anti-PD1 Antibody (Pembrolizumab) light chain

SEQ ID NO: 294 - protein, 583 aa, Homo sapiens
  misc_feature: Anti-PDL1 Antibody (Atezolizumab) - TIGIT ECD antibody-ligand trap
  misc_feature: Anti-PDL1 Antibody (Atezolizumab) heavy chain + TIGIT ECD
EVQLVESGGGLVQPGGSLRLSCAASGFTFSDSWIHWVRQAPGKGLEWVAWISPYGGSTYYADSVKGRFTISADTSKNTAYLQMNSLRAEDTAVYYCARRHWPGGFDYWGQGTLVTVSAASTKGPSVFPLAPSSKSTSGGTAALGCLVKDYFPEPVTVSWNSGALTSGVHTFPAVLQSSGLYSLSSVVTVPSSSLGTQTYICNVNHKPSNTKVDKKVEPKSCDKTHTCPPCPAPELLGGPSVFLFPPKPKDTLMISRTPEVTCVVVDVSHEDPEVKFNWYVDGVEVHNAKTKPREEQYASTYRVVSVLTVLHQDWLNGKEYKCKVSNKALPAPIEKTISKAKGQPREPQVYTLPPSREEMTKNQVSLTCLVKGFYPSDIAVEWESNGQPENNYKTTPPVLDSDGSFFLYSKLTVDKSRWQQGNVFSCSVMHEALHNHYTQKSLSLSPGKGGGGSGGGGSGGGGSMMTGTIETTGNISAEKGGSIILQCHLSSTTAQVTQVNWEQQDQLLAICNADLGWHISPSFKDRVAPGPGLGLTLQSLTVNDTGEYFCIYHTYPDGTYTGRIFLEVLESSVAEHGARFQIP

SEQ ID NO: 295 - protein, 214 aa, Homo sapiens; identical to SEQ ID NO: 180
  misc_feature: Anti-PDL1 Antibody (Atezolizumab) - TIGIT ECD antibody-ligand trap
  misc_feature: Anti-PDL1 Antibody (Atezolizumab) heavy chain + TIGIT ECD

SEQ ID NO: 296 - protein, 585 aa, Homo sapiens
  misc_feature: Anti-PDL1 Antibody (Avelumab) - TIGIT ECD antibody-ligand trap
  misc_feature: Anti-PDL1 Antibody (Avelumab) heavy chain + TIGIT ECD
EVQLLESGGGLVQPGGSLRLSCAASGFTFSSYIMMWVRQAPGKGLEWVSSIYPSGGITFYADTVKGRFTISRDNSKNTLYLQMNSLRAEDTAVYYCARIKLGTVTTVDYWGQGTLVTVSSASTKGPSVFPLAPSSKSTSGGTAALGCLVKDYFPEPVTVSWNSGALTSGVHTFPAVLQSSGLYSLSSVVTVPSSSLGTQTYICNVNHKPSNTKVDKRVEPKSCDKTHTCPPCPAPELLGGPSVFLFPPKPKDTLMISRTPEVTCVVVDVSHEDPEVKFNWYVDGVEVHNAKTKPREEQYNSTYRVVSVLTVLHQDWLNGKEYKCKVSNKALPAPIEKTISKAKGQPREPQVYTLPPSREEMTKNQVSLTCLVKGFYPSDIAVEWESNGQPENNYKTTPPVLDSDGSFFLYSKLTVDKSRWQQGNVFSCSVMHEALHNHYTQKSLSLSPGKGGGGSGGGGSGGGGSMMTGTIETTGNISAEKGGSIILQCHLSSTTAQVTQVNWEQQDQLLAICNADLGWHISPSFKDRVAPGPGLGLTLQSLTVNDTGEYFCIYHTYPDGTYTGRIFLEVLESSVAEHGARFQIP

SEQ ID NO: 297 - protein, 216 aa, Homo sapiens; identical to SEQ ID NO: 193
  misc_feature: Anti-PDL1 Antibody (Avelumab) - TIGIT ECD antibody-ligand trap
  misc_feature: Anti-PDL1 Antibody (Avelumab) light chain

SEQ ID NO: 298 - protein, 583 aa, Homo sapiens
  misc_feature: Anti-CTLA4 Antibody (Ipilimumab) - TIGIT ECD antibody-ligand trap
  misc_feature: Anti-CTLA4 Antibody (Ipilimumab) heavy chain + TIGIT ECD
QVQLVESGGGVVQPGRSLRLSCAASGFTFSSYTMHWVRQAPGKGLEWVTFISYDGNNKYYADSVKGRFTISRDNSKNTLYLQMNSLRAEDTAIYYCARTGWLGPFDYWGQGTLVTVSSASTKGPSVFPLAPSSKSTSGGTAALGCLVKDYFPEPVTVSWNSGALTSGVHTFPAVLQSSGLYSLSSVVTVPSSSLGTQTYICNVNHKPSNTKVDKRVEPKSCDKTHTCPPCPAPELLGGPSVFLFPPKPKDTLMISRTPEVTCVVVDVSHEDPEVKFNWYVDGVEVHNAKTKPREEQYNSTYRVVSVLTVLHQDWLNGKEYKCKVSNKALPAPIEKTISKAKGQPREPQVYTLPPSRDELTKNQVSLTCLVKGFYPSDIAVEWESNGQPENNYKTTPPVLDSDGSFFLYSKLTVDKSRWQQGNVFSCSVMHEALHNHYTQKSLSLSPGKGGGGSGGGGSGGGGSMMTGTIETTGNISAEKGGSIILQCHLSSTTAQVTQVNWEQQDQLLAICNADLGWHISPSFKDRVAPGPGLGLTLQSLTVNDTGEYFCIYHTYPDGTYTGRIFLEVLESSVAEHGARFQIP

SEQ ID NO: 299 - protein, 215 aa, Homo sapiens; identical to SEQ ID NO: 172
  misc_feature: Anti-CTLA4 Antibody (Ipilimumab) - TIGIT ECD antibody-ligand trap
  misc_feature: Anti-CTLA4 Antibody (Ipilimumab) light chain

SEQ ID NO: 300 - protein, 133 aa, Homo sapiens
  misc_feature: Anti-CTLA4 Antibody (Ipilimumab) - TIGIT ECD antibody-ligand trap
  misc_feature: Extracellular domain of CD160
INITSSASQEGTRLNLICTVWHKKEEAEGFVVFLCKDRSGDCSPETSLKQLRLKRDPGIDGVGEISSQLMFTISQVTPLHSGTYQCCARSQKSGIRLQGHFFSILFTETGNYTVTGLKQRQHLEFSHNEGTLS

SEQ ID NO: 301 - protein, 498 aa, Homo sapiens
  misc_feature: Anti-CTLA4 Antibody (Ipilimumab) - TIGIT ECD antibody-ligand trap
  misc_feature: Extracellular domain of CD
VWEKTVNTEENVYATLGSDVNLTCQTQTVGFFVQMQWSKVTNKIDLIAVYHPQYGFYCAYGRPCESLVTFTETPENGSKWTLHLRNMSCSVSGRYECMLVLYPEGIQTKIYNLLIQTHVTADEWNSNHTIEIEINQTLEIPCFQNSSSKISSEFTYAWSVENSSTDSWVLLSKGIKEDNGTQETLISQNHLISNSTLLKDRVKLGTDYRLHLSPVQIFDDGRKFSCHIRVGPNKILRSSTTVKVFAKPEIPVIVENNSTDVLVERRFTCLLKNVFPKANITWFIDGSFLHDEKEGIYITNEERKGKDGFLELKSVLTRVHSNKPAQSDNLTIWCMALSPVPGNKVWNISSEKITFLLGSEISSTDPPLSVTESTLDTQPSPASSVSPARYPATSSVTLVDVSALRPNTTPQPSNSSMTTRGFNYPWTSSGTDTKKSVSRIPSETYSSSPSGAGSTLHDNVFTSTARAFSEVPTTANGSTKTNHVHITGIVVNKPKDGM

SEQ ID NO: 302 - protein, 182 aa, Homo sapiens
  misc_feature: Anti-CTLA4 Antibody (Ipilimumab) - TIGIT ECD antibody-ligand trap
  misc_feature: Extracellular domain of LIGHT
LQLHWRLGEMVTRLPDGPAGSWEQLIQERRSHEVNPAAHLTGANSSLTGSGGPLLWETQLGLAFLRGLSYHDGALVVTKAGYYYIYSKVQLGGVGCPLGLASTITHGLYKRTPRYPEELELLVSQQSPCGRATSSSRVWWDSSFLGGVVHLEAGEKVVVRVLDERLVRLRDGTRSYFGAFMV

SEQ ID NO: 303 - protein, 200 aa, Homo sapiens
  misc_feature: Anti-CTLA4 Antibody (Ipilimumab) - TIGIT ECD antibody-ligand trap
  misc_feature: Extracellular domain of CD44
QIDLNITCRFAGVFHVEKNGRYSISRTEAADLCKAFNSTLPTMAQMEKALSIGFETCRYGFIEGHVVIPRIHPNSICAANNTGVYILTSNTSQYDTYCFNASAPPEEDCTSVTDLPNAFDGPITITIVNRDGTRYVQKGEYRTNPEDIYPSNPTDDDVSSGSSSERSSTSGGYIFYTFSTVHPIPDEDSPWITDSTDRIP

SEQ ID NO: 304 - protein, 109 aa, Homo sapiens
  misc_feature: Anti-CTLA4 Antibody (Ipilimumab) - TIGIT ECD antibody-ligand trap
  misc_feature: Fragment of Extracellular domain of TIM-3
SEVEYRAEVGQNAYLPCFYTPAAPGNLVPVCWGKGACPVFECGNVVLRTDERDVNYWTSRYWLNGDFRKGDVSLTIENVTLADSGIYCCRIQIPGIMNDEKFNLKLVIK

SEQ ID NO: 305 - protein, 20 aa, Homo sapiens
  misc_feature: Anti-CTLA4 Antibody (Ipilimumab) - TIGIT ECD antibody-ligand trap
  misc_feature: Fragment of LIGHT
ASTITHGLYKRTPRYPEELE

SEQ ID NO: 306 - protein, 22 aa, Homo sapiens
  misc_feature: Anti-CTLA4 Antibody (Ipilimumab) - TIGIT ECD antibody-ligand trap
  misc_feature: Fragment of LIGHT
ANSSLTGSGGPLLWETQLGLAF

SEQ ID NO: 307 - protein, 144 aa, Homo sapiens
  misc_feature: Anti-CTLA4 Antibody (Ipilimumab) - TIGIT ECD antibody-ligand trap
  misc_feature: Extracellular domain of LAIR1
QEEDLPRPSISAEPGTVIPLGSHVTFVCRGPVGVQTFRLERESRSTYNDTEDVSQASPSESEARFRIDSVSEGNAGPYRCIYYKPPKWSEQSDYLELLVKETSGGPDSPDTEPGSSAGPTQRPSDNSHNEHAPASQGLKAEHLY
